(19) United States
(12) Patent Application Publication
(10) Pub. No.: US 2018/0051089 A1
(43) Pub. Date: Feb. 22, 2018

(54) T CELL RECEPTOR KNOCK OUT ENGINEERED IMMUNE CELLS, ENDOWED WITH CHIMERIC ANTIGEN RECEPTORS BINDING TO CD123 FOR THE TREATMENT OF RELAPSED/REFRACTORY ACUTE MYELOID LYMPHOMA OR BLASTIC PLASMACYTOID DENDRITIC CELL NEOPLASM

(71) Applicant: Cellectis, Paris (FR)

(72) Inventors: Roman GALETTO, Paris (FR); Barbara Johnson SASU, San Francisco, CA (US); Arvind RAJPAL, San Francisco, CA (US); Philippe DUCHATEAU, Draveil (FR); Alexandre JUILLERAT, New York, NY (US); Julien VALTON, New York, NY (US); Mathieu SIMON, Paris (FR)

(21) Appl. No.: 15/546,623

(22) PCT Filed: Jan. 25, 2016
(86) PCT No.: PCT/EP2016/051471

§ 371 Date: Jul. 26, 2017

(30) Foreign Application Priority Data
Jan. 26, 2015 (DK) PA 2015 70044
Mar. 19, 2015 (EP) PCT/EP2015/055848

(51) Int. Cl. C07K 16/28; A61K 35/17; A61K 39/00; C07K 14/725; C07K 16/30; C12N 5/00; C12N 5/0783

(52) U.S. Cl. CPC C07K 16/2866; A61K 35/17; A61K 39/0011; C07K 14/7051; C07K 16/3061; C07K 2319/03; C12N 5/0638; A61K 2039/5158; A61K 2039/64; C07K 2317/24; C07K 2317/622; C12N 5/0093

(57) ABSTRACT

The present invention relates to a TCR KO—or TCR KO and dCK KO—engineered immune cells expressing a Chimeric Antigen Receptors (CAR) specific for CD123 that is a recombinant chimeric protein able to redirect immune cell specificity and reactivity toward CD123-expressing cells, and more particularly in which extracellular ligand binding is a scFV derived from a CD123 monoclonal antibody, conferring specific immunity against CD123 positive cells. The engineered immune cells endowed with such CD123 CARs are particularly suited for treating relapse refractory AML and blastic plasmacytoid dendritic cell neoplasm and for use as a treatment before bone marrow transplantation.

### FIELD OF THE INVENTION

[0001] The present invention relates generally to a TCR gene Knock out T cell engineered to express a Chimeric Antigen Receptor (CAR) specific for interleukin 3 receptor alpha chain (IL-3Ra, cluster of differentiation 123 CD123) and their use, e.g., for the treatment of a disease or a condition associated with expression of IL-3Ra, CD123, namely acute myeloid leukemia (AML) and Blastic plasmacytoid dendritic cell neoplasm (BPDCN).

[0002] The present invention relates to a T cell receptor (TCRalpha or beta gene) and/or human deoxycytidine kinase (dCK gene or dck gene) Knock out (KO) immune T cells engineered to express:
[0003] a Chimeric Antigen Receptor (CAR) specific for the cluster of differentiation 123 (CD123) comprising at least one extracellular ligand binding domain from Klon43, optionally humanized, a hinge, an intracellular domain and a costimulatory domain,
[0004] a suicide domain, optionally inserted into a said hinge,
   said CD123 CAR being specific for human CD123 and conferring a specific immunity against CD123 positive cells,
   in one embodiment; this object for its used for the treatment of acute myeloid leukemia AML, or of a complication of AML is provided,
   in one embodiment; this object is provided for the treatment of Blastic plasmacytoid dendritic cell neoplasm (BPDCN).
   in one embodiment; this object is provided as a treatment before bone marrow transplant as a bridge of transplant.

[0005] The engineered immune cells endowed with the CD123 CARs according to the invention show high efficiency in view of treating lymphomas and leukemias as compared to previous CD123 CAR, and can be used in the presence of purine analogue with less side effects than previous treatments in patients.

### BACKGROUND OF THE INVENTION

[0006] Induction treatments for lymphoproliferative diseases such as leukemia and in particular for acute myeloid leukemia (AML) have remained largely unchanged for nearly 50 years. Such standard induction chemotherapy can induce complete remissions, but many patients eventually relapse and succumb to the disease, calling for the development of novel therapeutics for AML, in particular for relapsed refractory AML.

[0007] Similar observations were reported for aggressive lymphoproliferative diseases such as BPDCN. These diseases remain of poor prognosis. Immunophenotyping of these cancerous cells have revealed that the interleukin 3 receptor alpha chain (IL-3Rα; CD123—NCBI reference: NP_001254642) is a potential immunotherapeutic target since it is over-expressed on these tumor cells compared to normal cells. Additionally, two phase I trials for CD123-specific therapeutics have been completed with both drugs displaying good safety profiles (ClinicalTrials.gov ID: NCT00401739 and NCT00397579). Unfortunately, these CD123 targeting drugs had limited efficacy suggesting that alternative, and more potent and specific therapies targeting CD123 are required to observe anti-leukemic activity.

[0008] A possibly more potent alternative therapy for the treatment of Leukemia could be the use of immune cells expressing chimeric antigen receptors (CARs) that selectively direct immune cell specificity towards cell surface tumor associated antigens (TAAs) in an MHC-independent manner (Jena, Dotti et al. 2010) and destroy them.

[0009] CARs are synthetic receptors consisting of a targeting moiety that is associated with one or more signaling domains in a single or multiple fusion molecule(s). In general, the binding moiety of a CAR consists of an antigen-binding domain of a single-chain antibody (scFv), comprising the light and variable fragments of a monoclonal antibody joined by a flexible linker. Binding moieties based on receptor or ligand domains have also been used successfully. The signaling domains for first generation CARs are derived from the cytoplasmic region of the CD3zeta or the Fc receptor gamma chains. First generation CARs have been shown to successfully redirect T cell cytotoxicity, however, they failed to provide prolonged expansion and anti-tumor activity in vivo. Signaling domains from co-stimulatory molecules including OX-40 (CD134), and 4-1BB (CD137) have been added alone or in combination to enhance survival and increase proliferation of CAR modified T cells in vitro. However, not all combination of domains results in a CAR that can direct immune cells to target cells in vivo.

[0010] In mouse models of human cancer, CARs can redirected the CAR-expressing cells against antigens expressed at the surface of tumor cells with an efficiency dependent on the nature and length of each domain (Condomine M. et al., 2015 Plos One 10(6):e0130518). So far autologous transfer of CAR-expressing specific T cells, alone, has been shown to be successful in treating specific forms of cancer despite several side effects such as cytokine storm, non specific destruction of cell populations, or unwanted specific immune reactions (Park, Rosenberg et al. 2011). It is not known whether allogenic CD123 CAR engineered T cells can be used safely and efficiently for the treatment of AML (ClinicalTrials.gov ID: NCT02159495).

[0011] Thus, to broaden the population of patients that may benefit such treatments so called allogenic T cells expressing CAR have been prepared for their use in human suffering cancer. in that case, immune cells are isolated from healthy donors, engineered, and then used as a treatment in several different selected patients in need thereof.

[0012] For that purpose and to reduce the risk of potential graft versus host disease, selected genes were carefully knocked out to provide engineered CAR-expressing immune cells with reduced expression of molecules involved in the immune response, for example that of MHC molecules or subunits of the TCR molecules. The extent to which such engineered cells still proliferate and survive in any hosts remains largely unknown, especially in patients already treated with chemotherapy agents.

[0013] The use of such CAR expressing immune T cell targeting CD123 in combination with cytotoxic chemotherapy agents as a treatment usually employed as anti-cancer treatments remains a problem as anti-cancer treatments also affect the proliferation and/or survival of T cells.

Thus, there is also a need of developing T cells targeting CD123 that would be specific efficient and compatible with the use of drugs, in particular of anti-cancer chemotherapies, such as those affecting cell proliferation, that would still be able to proliferate and survive to reach their target (cancer cells).

[0014] To use “off-the-shelf” allogeneic therapeutic cells in conjunction with chemotherapy, the inventors identified means to provide allogenic engineering T-cell, less allogenic and permissive for the immune system of patients suffering a cancer and/or already treated with chemotherapeutic agents. The therapeutic benefits are provided by the synergistic effects between chemotherapy and immunotherapy of the claimed objects.

[0015] The present invention is also drawn to anti-CD123 chimeric antigen receptors (anti-CD123 CAR), which extracellular binding domain (scFv) is modified in such a way to allow both cell sorting and cell depletion. The structure allowing this is an epitope recognized by a monoclonal antibody (named mAb-driven sorting/depletion system or epitope recognized by a specific monoclonal antibody or mimotope) and comprises a selected epitope inserted into the extracellular domain within the scFv and/or the hinge. This epitope has the specificity to be recognized by a specific antibody (preferably a monoclonal antibody (mAb), optionally humanized). Given the fact that mainly the external ligand binding domain of the CAR is modified to include the epitope, different CAR architectures can be envisioned: single-chain or multi-chain as disclosed in PCTUS2013/058005.

[0016] The chimeric scFv of the invention, which is formed of the VH and VL polypeptides and the specific epitope(s) may itself have different structures depending on the position of insertion of the epitope and the use of linkers (FIG. 3). The present invention also relates to the resulting method for sorting and/or depleting the engineered immune cells endowed with the modified CARs.

[0017] Several epitope-mAb couples can be used to generate such system; in particular those already approved for medical use, such as CD20/rituximab as a non-limiting example.

[0018] Finally, the invention encompasses therapeutic methods where number, activity and survival of the engineered immune cells endowed with anti-CD123 CARs is modulated by depleting the cells by using an antibody that directs the external ligand binding domain of said CARs.

### SUMMARY OF THE INVENTION

[0019] Interleukin 3 receptor alpha chain (CD123) has been identified as being frequently over-expressed on Leukemia tumor cells, especially in the case of acute myeloid leukemia (AML), compared to normal cells of the same lineage.

[0020] The inventors have generated an immune cell engineered to express a CD123 specific CAR comprising a scFV from KLON43 antibody, a hinge from FcγRIIIα, and intracellular domains conferring host cells the capacity to proliferate in vivo, reach CD123 target cells and alter their survival, said cell comprising additional marker or suicide domain allowing their specific destruction once target cells are contained. These CD123 specific CAR are designated CD123 specific CAR or anti-CD123 CAR, or 123 CAR, or “CAR of the invention” indiscriminately.

[0021] In the present invention, a specific and selective tolerogenic TCR KO CD123 CAR expressing T cell was prepared using one antibody specific for this IL-3 receptor subunit, namely klon43 or humanized sequences derived from this klon43 antibody for the treatment of patients suffering AML, B-cell lymphoproliferative disorder (BC-LPD) or BPDCN.

[0022] Concomitantly, these cells allow the destruction precancerous cells stopping the progression and emergence of refractory/relapsed cancer. Due to their capacity to proliferate in vivo and reach tissues or niches these cells acts faster than cancerous cells themselves and can eradicate even aggressive lymphoproliferative disorder.

[0023] Following non-specific activation in vitro (e.g. with anti CD3/CD28 coated beads and recombinant IL2), T-cells from donors have been transformed with polynucleotides expressing CARs of the invention using viral transduction. The T-cells were further engineered to create less-alloreactive T-cells, by disruption of a component of the T cell receptor TCR (αβ-T-Cell receptors) to reduce Graft versus host reaction.

[0024] In a preferred embodiment, T-cells were further engineered by deleting specific combination(s) of genes identified in table 9, to create tolerogene T cells resistant to anti-cancer drugs, to be used in combination with said classical anti-cancer drugs, namely purine analogs.

[0025] The resulting engineered T-cells displayed reactivity against CD123 positive cells showing that the CARs of the present invention contribute to antigen dependent activation, and also proliferation, of the T-cells, making them useful for immunotherapy.

[0026] The resulting engineered T-cells displayed reactivity in-vivo against CD123 positive cells and significantly reduce the number of cancer cells in vivo.

[0027] In a particular embodiment, several administrations of the engineered T-cells of the invention can be performed, making them useful for immunotherapy as a first treatment (induction), as a consolidation treatment, as a treatment in combination with classical anticancer chemotherapy.

[0028] The polypeptides and polynucleotide sequences encoding the CARs of the present invention are detailed in the present specification.

[0029] The engineered immune cells of the present invention are particularly useful for therapeutic applications such as B-cell lymphoma or leukemia treatments and can be selectively eliminated from the organism. R

### BRIEF DESCRIPTION OF THE FIGURES

[0030] FIG. 1: Schematic representation of an engineered immune cell according to the invention. The engineered immune cell presented in this figure is a T-cell transduced with a retroviral polypeptide encoding CAR. This T-cell is further engineered to allow a better and safer engraftment into the patient, which is part of the frame of the present invention. X gene is a gene expressing a component of TCR (TCRalpha or TCRbeta gene), Y a gene involved into the sensitivity of T-cells to purine analogues, dCK.

[0031] FIG. 2: Schematic representation of the two CAR of the invention (123 CAR) comprising a CD123 scfv, optionally humanized, a hinge from FcRIII or CD8alpha, a transmembrane domain from CD8alpha, and two intracellular domains from 4-1BB and CD3zeta.

[0032] FIG. 3: Shows examples of a CAR according to the invention.

[0033] L: linker between VH and VL of (GGGGS)n with n=1 to 4, preferably n=3 (SEQ ID NO.: 10)

[0034] Li: linker sequence corresponding to GGGS or SGGGGS or GSGGGGS, TM: transmembrane domain.

[0035] A CD123 CAR of the invention comprising a VH from Klon 43, optionally humanized, a linker L, a VL from Klon 43, optionally humanized, a suicide domain (e.g. two copies of a CD20 mimotope of sequence CPYSNPSLCS (SEQ ID NO. 161), and a copy of SEQ ID NO 169), said mimotopes are located preferably in the scfv, a CD8 hinge or part of it, a transmembrane domain (CD8 TM) from CD8alpha, a co-stimulatory domain (4-113B) and a stimulatory domain (ITAM CD3 zeta), was prepared.

[0036] In a CD123 CAR of the invention, two copies of a CD20 mimotope of sequence CPYSNPSLCS, linked to each other and to the VL by a linker Li, were inserted between the anti-CD123 scFv and a hinge from CD8alpha, an optional linker LI joins the mimotopes to the hinge (SEQ ID NO 160).

[0037] Other possibilities of epitope (eg in scfv) insertion are contemplated and illustrated as a circle in FIG. 3.

[0038] FIG. 4: Degranulation activity of different a scFv according to the invention for one architecture (v3: CD8-hinge/CD8-transmembrane), when CAR+ T-cells were co-cultured for 6 hours with CD123 expressing cells (RPM18226), or with cells that do not express CD123 (K562).

[0039] FIG. 5: IFN gamma release by T-cells when co-cultured for 24 h with cells expressing different levels of CD123 (KG1a or RPM18226), or with cells that do not express CD123 (K562)

[0040] FIG. 6: Dose-response of the specific cytolytic activity of CAR-T cells in vivo in mice treated with PNA (20 mg/kg) ip.

[0041] FIG. 7: Dose-response of the specific cytolytic activity of CAR-T cells in vivo in mice treated with PNA (20 mg/kg) ip.

TABLE 1

| Functional domains | SEQ ID # | amino acid sequence |
|---|---|---|
| CD8α signal peptide | SEQ ID NO. 1 | MALPVTALLLPLALLLHAARP |
| Alternative signal peptide | SEQ ID NO. 2 | METDTLLLWVLLLWVPGSTG |
| FcγRIIIα hinge | SEQ ID NO. 3 | GLAVSTISSFFPPGYQ |
| CD8α hinge | SEQ ID NO. 4 | TTTPAPRPPTPAPTIASQPLSLRPEACRPA |
| | | AGGAVHTRGLDFACD |
| IgG1 hinge | SEQ ID NO. 5 | EPKSPDKTHTCPPCPAPPVAGPSVFLFPP |
| | | KPKDTLMIARTPEVTCVVVDVSHEDPEV |
| | | KFNWYVDGVEVHNAKTKPREEQYNSTY |
| | | RVVSVLTVLHQDWLNGKEYKCKVSNKAL |
| | | PAPIEKTISKAKGQPREPQVYTLPPSRDEL |
| | | TKNQVSLTCLVKGFYPSDIAVEWESNGQ |
| | | PENNYKTTPPVLDSDGSFFLYSKLTVDKS |
| | | RWQQGNVFSCSVMHEALH NHYTQKSL |
| | | SLSPGK |
| CD8α transmembrane domain | SEQ ID NO. 6 | IYIWAPLAGTCGVLLLSLVITLYC |
| 41BB transmembrane domain | SEQ ID NO. 7 | IISFFLALTSTALLFLLFFLTLRFSVV |
| 41BB intracellular domain | SEQ ID NO. 8 | KRGRKKLLYIFKQPFMRPVQTTQEEDGC |
| | | SCRFPEEEEGGCEL |
| CD3ζ intracellular domain | SEQ ID NO. 9 | RVKFSRSADAPAYQQGQNQLYNELNLG |
| | | RREEYDVLDKRRGRDPEMGGKPRRKNP |
| | | QEGLYNELQKDKMAEAYSEIGMKGERR |
| | | RGKGHDGLYQGLSTATKDTYDALHMQA |
| | | LPPR |
| Linker | SEQ ID NO. 10 | GGGGSGGGGSGGGGS |

TABLE 2
Sequence of the antibody fragments from
Klon 43 used in the anti-CD123 scfv of the
invention for the CD123 CAR of the invention

| ScFv | SEQ ID | |
|---|---|---|
| sequences | # | amino acid sequence |
| Klon43 | SEQ ID | MADYKDIVMTQSHKFMSTSVGDRVNITCKA |
| light chain | NO. 11 | SQNVDSAVAWYQQKPGQSPKALIYSASYRY |
| variable | | SGVPDRFTGRGSGTDFTLTISSVQAEDLAVYY |
| region | | CQQYYSTPWTFGGGTKLEIKR |
| Klon43 | SEQ ID | EVKLVESGGGLVQPGGSLSLSCAASGFTFTD |
| heavy chain | NO. 12 | YYMSWVRQPPGKALEWLALIRSKADGYTTE |
| variable | | YSASVKGRFTLSRDDSQSILYLQMNALRPEDS |
| region | | ATYYCARDAAYYSYYSPEGAMDYWGQGTS |
| | | VTVSS |

TABLE 3
Sequence of the humanized antibody fragments from Klon 43 used in the
anti-CD123 scfv of the invention for the CD123 CAR of the invention

| Functional domains | SEQ ID # | Raw amino acid sequence |
|---|---|---|
| Humanized scFv Klon43 | SEQ ID NO. 18 | MADYKDIVMTQSPSSVSASVGDRVTITCRASQNVDS |
| Variant VL1 | | AVAWYQQKPGKAPKALIYSASYRYSGVPSRFSGRGSG |
| | | TDFTLTISSLQPEDFATYYCQQYYSTPWTFGQGTKVEI |
| | | KR |
| Humanized scFv Klon43 | SEQ ID NO. 19 | MADYKDIQMTQSPSSVSASVGDRVTITCRASQNVDS |
| Variant VL2 | | AVAWYQQKPGKAPKALIYSASYRYSGVPSRFSGRGSG |
| | | TDFTLTISSLQPEDFATYYCQQYYSTPWTFGQGTKVEI |
| | | KR |
| Humanized scFv Klon43 | SEQ ID NO. 20 | MADYKDIQMTQSPSSVSASVGDRVTITCRASQNVDS |
| Variant VL3 | | AVAWYQQKPGKAPKALIYSASYRYSGVPSRFSGSGSG |
| | | TDFTLTISSLQPEDFATYYCQQYYSTPWTFGQGTKVEI |
| | | KR |
| Humanized scFv Klon43 | SEQ ID NO. 21 | MADYKDIQMTQSPSSVSASVGDRVTITCRASQNVDS |
| Variant VL4 | | AVAWYQQKPGKAPKLLIYSASYRYSGVPSRFSGSGSG |
| | | TDFTLTISSLQPEDFATYYCQQYYSTPWTFGQGTKVEI |
| | | KR |
| Humanized scFv Klon43 | SEQ ID NO. 22 | MADYKDIQMTQSPSSVSASVGDRVTITCRASQNVDS |
| Variant VL5 | | AVAWYQQKPGKAPKLLIYSASYRQSGVPSRFSGSGSG |
| | | TDFTLTISSLQPEDFATYYCQQYYSTPWTFGQGTKVEI |
| | | KR |
| Humanized scFv Klon43 | SEQ ID NO. 23 | MADYKDIQMTQSPSSVSASVGDRVTITCRASQNVDS |
| Variant VL6 | | AVAWYQQKPGKAPKLLIYSASYGQSGVPSRFSGSGSG |
| | | TDFTLTISSLQPEDFATYYCQQYYSTPWTFGQGTKVEI |
| | | KR |
| Humanized scFv Klon43 | SEQ ID NO. 24 | EVKLVESGGGLVQPGRSLRLSCTASGFTFTDY |
| Variant VH1 | | YMSWVRQAPGKGLEWVGLIRSKADGYTTEYSAS |
| | | VKGRFTISRDDSKSILYLQMNSLKTEDTAVYYC |
| | | ARDAAYYSYYSPEGAMDYWGQGTLVTVSS |
| Humanized scFv Klon43 | SEQ ID NO. 25 | EVQLVESGGGLVQPGRSLRLSCTASGFTFTDY |
| Variant VH2 | | YMSWVRQAPGKGLEWVGLIRSKADGYTTEYSA |
| | | SVKGRFTISRDDSKSILYLQMNSLKTEDTAVY |
| | | YCARDAAYYSYYSPEGAMDYWGQGTLVTVSS |
| Humanized scFv Klon43 | SEQ ID NO. 26 | EVQLVESGGGLVQPGRSLRLSCTASGFTFTDY |
| Variant VH3 | | YMSWVRQAPGKGLEWVGLIRSKADGYTTEYSAS |
| | | VKGRFTISRDDSKSIAYLQMNSLKTEDTAVYYCA |
| | | RDAAYYSYYSPEGAMDYWGQGTLVTVSS |
| Humanized scFv Klon43 | SEQ ID NO. 27 | EVQLVESGGGLVQPGRSLRLSCTASGFTFTDY |
| Variant VH4 | | YMSWVRQAPGKGLEWVGFIRSKADGYTTEYSAS |
| | | VKGRFTISRDDSKSIAYLQMNSLKTEDTAVYYCA |
| | | RDAAYYSYYSPEGAMDYWGQGTLVTVSS |
| Humanized scFv Klon43 | SEQ ID NO. 28 | EVQLVESGGGLVQPGRSLRLSCTASGFTFTDY |
| Variant VH5 | | YMSWVRQAPGKGLEWVGFIRSKADGYTTEYAAS |
| | | VKGRFTISRDDSKSIAYLQMNSLKTEDTAVYYCA |
| | | RDAAYYSYYSPEGAMDYWGQGTLVTVSS |
| Humanized scFv Klon43 | SEQ ID NO. 29 | EVQLVESGGGLVQPGRSLRLSCTASGFTFTDY |
| Variant VH6 | | YMSWVRQAPGKGLEWVGLIRSKADGYTTEYAA |
| | | SVKGRFTISRDDSKSIAYLQMNSLKTEDTAVYY |
| | | CARDAAYYSYYSPEGAMDYWGQGTLVTVSS |
| Humanized scFv Klon43 | SEQ ID NO. 30 | EVQLVESGGGLVQPGRSLRLSCTASGFTFTDYYMSW |
| Variant VH7 | | VRQAPGKGLEWVGFIRSKADGYTTEYAASVKGRFTIS |
| | | RDDSKSIAYLQMNSLKTEDTAVYYCTRDAAYYSYYSPE |
| | | GAMDYWGQGTLVTVSS |

TABLE 4
CAR of structure V-1

| CAR | | | | | | | |
|---|---|---|---|---|---|---|---|
| Desig- | CAR Structure | | | | | | |
| nation | signal | | | FcγRIIIα | CD8α | 41BB- | CD3ζ |
| V-1 | peptide | VH | VL | hinge | TM | IC | CD |
| Klo43-1 | SEQ | SEQ | SEQ | SEQ | SEQ | SEQ | SEQ |
| (SEQ ID | ID | ID | ID | ID | ID | ID | ID |
| NO: 31) | NO. 1 | NO. 12 | NO. 11 | NO. 3 | NO. 6 | NO. 8 | NO. 9 |

TABLE 5
CAR of structure V-3

| CAR | CAR Structure | | | | | | |
|---|---|---|---|---|---|---|---|
| Designation | signal | | | CD8α | CD8α | 41BB- | CD3ζ |
| V-3 | peptide | VH | VL | hinge | TM | IC | CD |
| Klo43-3 | SEQ | SEQ | SEQ | SEQ | SEQ | SEQ | SEQ |
| (SEQ ID | ID | ID | ID | ID | ID | ID | ID |
| NO: 32) | NO. 1 | NO. 12 | NO. 11 | NO. 4 | NO. 6 | NO. 8 | NO. 9 |

TABLE 6
CAR of structure V-5

| CAR | CAR Structure | | | | | | |
|---|---|---|---|---|---|---|---|
| Designation | signal | | | IgG1 | CD8α | 41BB- | CD3ζ |
| V-5 | peptide | VH | VL | hinge | TM | IC | CD |
| Klo43-5 | SEQ | SEQ | SEQ | SEQ | SEQ | SEQ | SEQ |
| (SEQ ID | ID | ID | ID | ID | ID | ID | ID |
| NO: 33) | NO. 1 | NO. 12 | NO. 11 | NO. 5 | NO. 6 | NO. 8 | NO. 9 |

TABLE 7
Examples of mAb-specific epitopes also called
mimotope (and their corresponding mAbs) that
can be used in the extracellular domain of the
CAR of the invention such as for example
mimotopes and epitope with their corresponding mAb
Rituximab

| | | |
|---|---|---|
| Mimotope | SEQ ID NO 161 | CPYSNPSLC |

Palivizumab

| | | |
|---|---|---|
| Epitope | SEQ ID NO 162 | NSELLSLINDMPITNDQKKLMSNN |

Cetuximab

| | | |
|---|---|---|
| Mimotope 1 | SEQ ID NO 163 | CQFDLSTRRLKC |
| Mimotope 2 | SEQ ID NO 164 | CQYNLSSRALKC |
| Mimotope 3 | SEQ ID NO 165 | CVWQRWQKSYVC |
| Mimotope 4 | SEQ ID NO 166 | CMWDRFSRWYKC |

Nivolumab

| | | |
|---|---|---|
| Epitope 1 | SEQ ID NO 167 | SFVLNWYRMSPSNQTDKLAAFPEDR |
| Epitope 2 | SEQ ID NO 168 | SGTYLCGAISLAPKAQIKE |

QBEND-10

| | | |
|---|---|---|
| Epitope | SEQ ID NO 169 | ELPTQGTFSNVSTNVSPAKPTTTA |

Alemtuzumab

| | | |
|---|---|---|
| Epitope | SEQ ID NO 170 | GQNDTSQTSSPS |

[0043] Sequences of the anti-CD123 CAR of the invention (SEQ ID NO.:31-160), preferred sequences are SEQ ID NO.:31, 32, 160 and 34-117, among 34-117 more preferred are 76 to 117, even more preferred SEQ ID NO. 32, SEQ ID NO. 89, SEQ ID NO. 94, SEQ ID NO. 95, SEQ ID NO. 96, SEQ ID NO. 97.

### DETAILED DESCRIPTION OF THE INVENTION

[0044] The present invention provides:
[0045] 1. A CD123 specific chimeric antigen receptor (CD123 CAR) comprising
   [0046] an extracellular domain comprising an extra cellular ligand binding-domain comprising successively, a VH optionally humanized a linker, preferably a linker of sequence (GGGGS)n with n=1-4, preferably n=3, and a VL optionally humanized a hinge,
   [0047] a transmembrane domain and
   [0048] a cytoplasmic domain.
   [0049] at least one epitope specific for a monoclonal antibody (mimotope).
[0050] 2. the CD123 CAR according to 1 comprising
   [0051] an extracellular domain comprising an extra cellular ligand binding-domain comprising successively, a VH selected from SEQ ID NO 12, SEQ ID NO 24, SEQ ID NO 25, SEQ ID NO 26, SEQ ID NO 27, SEQ ID NO 28, SEQ ID NO 29 and SEQ ID NO 30, optionally humanized a linker, preferably a linker of sequence (GGGGS)n with n=1-4, preferably n=3, and a VL selected from SEQ ID NO 11, SEQ ID NO 18, SEQ ID NO 19, SEQ ID NO 20, SEQ ID NO 21, SEQ ID NO 22 and SEQ ID NO 23, optionally humanized a hinge,
   [0052] a transmembrane domain from CD8 alpha, and
   [0053] a cytoplasmic domain including a CD3 zeta signaling domain and a co-stimulatory domain from 4-1BB.
[0054] 3. The CD123 CAR according to 1 or 2 comprising no sequence having identity the human CD28 NP_006130.1.
[0055] 4. The CD123 CAR according to any one of 1 to 3 comprising a sequence selected from SEQ ID NO 172, SEQ ID NO 173, SEQ ID NO 174, SEQ ID NO 175, SEQ ID NO 176, SEQ ID NO 177, SEQ ID NO 178, SEQ ID NO 179, SEQ ID NO 180, SEQ ID NO 181, SEQ ID NO 182, SEQ ID NO 183, SEQ ID NO 184, SEQ ID NO 185, SEQ ID NO 186 and SEQ ID NO 187, optionally further comprising at least one SEQ ID No 161.
[0056] 5. the CD123 CAR according to any one of 1 to 4 wherein said extracellular domain comprises at least one epitope specific for a monoclonal antibody (mimotope), selected from the list consisting of SEQ ID NO 161, SEQ ID NO 162, SEQ ID NO 163, SEQ ID NO 164, SEQ ID NO 165, SEQ ID NO 166, SEQ ID NO 167, SEQ ID NO 168, SEQ ID NO 169 and SEQ ID NO 170, preferably of SEQ ID NO 161 and of SEQ ID NO 169.
[0057] 6. the CD123 CAR according to any one of 1 to 5 comprising a sequence selected from SEQ ID NO 160, SEQ ID NO 171, SEQ ID NO 188, SEQ ID NO 189, SEQ ID NO 190, SEQ ID NO 191, SEQ ID NO 192, SEQ ID NO 193, SEQ ID NO 194, SEQ ID NO 195, SEQ ID NO 196, and SEQ ID NO 197.
[0058] 7. A polynucleotide encoding a CD123 specific chimeric antigen receptor (CD123 CAR) according to any one of claims 1 to 6.
[0059] 8. An expression vector comprising a polynucleotide according to claim 7.
[0060] 9. An expression vector comprising a backbone and at least one sequence coding any one of the CD123 CAR defined in any one of claims 1 to 6.
[0061] 10. An expression vector comprising a backbone, an EF1 promotor, an RQR8 open reading frame (RQR8 ORF), a sequence coding any one of the CD123 CAR of 1 to 6.
[0062] 11. A T Cell Receptor (TCR) knock-out (KO) or TCR and human deoxycytidine kinase (dCK) KO engineered immune cell expressing at the cell surface membrane a CD123 CAR according to any one of 1 to 6.
[0063] 12. A TCR KO or TCR and dCK KO engineered immune cell comprising a polynucleotide coding a CD123 specific chimeric antigen receptor (CD123 CAR) according to any one of 1 to 6.
[0064] 13. A TCR KO or TCR KO and dCK KO CD123 CAR-expressing engineered immune cell according to 4 further expressing a suicide domain at the cell surface.
[0065] 14. A TCR KO or TCR KO and dCK KO CD123 CAR-expressing engineered immune cell according to any one of the 11 to 13 wherein the expression of at least one MHC protein, is suppressed.
[0066] 15. A TCR KO or TCR KO and dCK KO CD123 CAR-expressing engineered immune cell according to any one of 11 to 14 for use in therapy.
[0067] 16. A TCR KO or TCR KO and dCK KO CD123 CAR-expressing engineered immune cell according to 15 wherein the condition is acute myelogenous leukemia (AML), preferably refractory/relapsed AML, BPDNL, or for use during or before bone marrow transplant.
[0068] 17. A TCR KO or TCR KO and dCK KO CD123 CAR-expressing engineered immune cell according to 15, for use as a treatment, preferably as a treatment for a lymphoproliferative disorder, more preferably for leukemia of lymphoma or for a treatment selected from the group consisting of acute myelogenous leukemia, chronic myelogenous leukemia, myelodysplastic syndrome, acute lymphoid leukemia, chronic lymphoid leukemia, and myelodysplastic syndrome and BPDNL.
[0069] 18. A TCR KO or TCR KO and dCK KO CD123 CAR-expressing engineered immune cell according to 15, for use as a treatment for AML.

[0070] The present invention also provides:

1a. A polypeptide encoding chimeric antigen receptor (CAR) specific for CD123 comprising at least one extracellular binding domain, said extracellular domain comprising at least one scFv said scfv is comprising at least a VH chain and a VL chain binding specifically to CD123, wherein said extracellular binding domain comprises at least one mAb-specific epitope or mimotope.
2a. The polypeptide according to 1a, wherein said mAb-specific epitope is located between the VH and VL chains, or before the VH and the VL.

[0071] In one embodiment, the polypeptide encoding a chimeric antigen receptor (CAR) specific for CD123 is comprising a transmembrane domain (TM) and a hinge and said mAb-specific epitope is located between the scfv and the hinge.

[0072] The present invention provides:

3a. a polypeptide according to 1a or 2a, wherein said VH and VL chains, and mAb specific-epitope are bound together by at least one linker and by a hinge to the transmembrane domain of said CAR.
4a. The polypeptide according to 3a, wherein the mAb-epitope is joined to the VH and VL chains by two linkers.
5a. The polypeptide according to any one of 1a to 3a wherein the mAb-specific epitope is an epitope to be bound by an epitope-specific mAb for in vitro cell sorting and/or in vivo cell depletion of T cells expressing a CAR comprising such epitope.
6a. The polypeptide according to any one of 1a to 5a, wherein the polypeptide comprises one extracellular binding domain, a transmembrane domain, and an intracellular domain, wherein said extracellular binding domain comprises at least one mAb-specific epitope.
7a. The polypeptide according to any one of 1a to 6a, wherein the extracellular binding domain comprises 1, 2, 3, 4, 5, 6, 7, 8, 9 or 10 mAb-specific epitopes.
8a. The polypeptide according to any one of 1a to 7a, wherein the extracellular binding domain comprises 1, 2, 3 or, 4 mAb-specific epitopes.
9a. The polypeptide according to any one of 1a to 8a, wherein the extracellular binding domain comprises 2, 3 or, 4 mAb-specific epitopes.
10a. The polypeptide according to any one of 1a to 9a, wherein the extracellular binding domain comprises the following sequence
V₁-L₁-V₂-(L)ₓ-Epitope1-(L)ₓ-;
V₁-L₁-V₂-(L)ₓ-Epitope1-(L)ₓ-Epitope2-(L)ₓ-;
V₁-L₁-V₂-(L)ₓ-Epitope1-(L)ₓ-Epitope2-(L)ₓ-Epitope3-(L)ₓ-;
(L)ₓ-Epitope1-(L)ₓ-V₁-L₁-V₂;
(L)ₓ-Epitope1-(L)ₓ-Epitope2-(L)ₓ-V₁-L₁-V₂;
Epitope1-(L)ₓ-Epitope2-(L)ₓ-Epitope3-(L)ₓ-V₁-L₁-V₂;
(L)ₓ-Epitope1-(L)ₓ-V₁-L₁-V₂-(L)ₓ-Epitope2-(L)ₓ;
(L)ₓ-Epitope1-(L)ₓ-V₁-L₁-V₂-(L)ₓ-Epitope2-(L)ₓ-Epitope3-(L)ₓ-;
(L)ₓ-Epitope1-(L)ₓ-V₁-L₁-V₂-(L)ₓ-Epitope2-(L)ₓ-Epitope3-(L)ₓ-Epitope4-(L)ₓ-;
(L)ₓ-Epitope1-(L)ₓ-Epitope2-(L)ₓ-V₁-L₁-V₂-(L)ₓ-Epitope3-(L)ₓ-;
(L)ₓ-Epitope1-(L)ₓ-Epitope2-(L)ₓ-V₁-L₁-V₂-(L)ₓ-Epitope3-(L)ₓ-Epitope4-(L)ₓ-;
V₁-(L)ₓ-Epitope1-(L)ₓ-V₂;
V₁-(L)ₓ-Epitope1-(L)ₓ-V₂-(L)ₓ-Epitope2-(L)ₓ;
V₁-(L)ₓ-Epitope1-(L)ₓ-V₂-(L)ₓ-Epitope2-(L)ₓ-Epitope3-(L)ₓ;
V₁-(L)ₓ-Epitope1-(L)ₓ-V₂-(L)ₓ-Epitope2-(L)ₓ-Epitope3-(L)ₓ-Epitope4-(L)ₓ;
(L)ₓ-Epitope1-(L)ₓ-V₁-(L)ₓ-Epitope2-(L)ₓ-V₂; or,
(L)ₓ-Epitope1-(L)ₓ-V₁-(L)ₓ-Epitope2-(L)ₓ-V₂-(L)ₓ-Epitope3-(L)ₓ;
wherein,
V₁ is V_{L} and V₂ is V_{H} or V₁ is V_{H} and V₂ is V_{L};
L₁ is a linker suitable to link the V_{H} chain to the V_{L} chain;
L is a linker comprising glycine and serine residues, and each occurrence of L in the extracellular binding domain can be identical or different to other occurrence of L in the same extracellular binding domain, and,
x is 0 or 1 and each occurrence of x is selected independently from the others; and,
Epitope 1, Epitope 2 and Epitope 3 are mAb-specific epitopes and can be identical or different.
11a. The polypeptide according to 10a, wherein the extracellular binding domain comprises the following sequence
V₁-L₁-V₂-L-Epitope1; V₁-L₁-V₂-L-Epitope1-L; V₁-L₁-V₂-L-Epitope1-L-Epitope2; V₁-L₁-V₂-L-Epitope1-L-Epitope2-L; V₁-L₁-V₂-L-Epitope1-L-Epitope2-L-Epitope3; V₁-L₁-V₂-L-Epitope1-L-Epitope2-L-Epitope3-L; V₁-L₁-V₂-Epitope1; V₁-L₁-V₂-Epitope1-L; V₁-L₁-V₂-Epitope1-L-Epitope2; V₁-L₁-V₂-Epitope1-L-Epitope2-L; V₁-L₁-V₂-Epitope1-L-Epitope2-L-Epitope3; V₁-L₁-V₂-Epitope1-L-Epitope2-L-Epitope3-L; Epitope1-V₁-L₁-V₂; Epitope1-L-V₁-L₁-V₂; L-Epitope1-V₁-L₁-V₂; L-Epitope1-L-V₁-L₁-V₂; Epitope1-L-Epitope2-V₁-L₁-V₂; Epitope1-L-Epitope2-L-V₁-L₁-V₂; L-Epitope1-L-Epitope2-V₁-L₁-V₂; L-Epitope1-L-Epitope2-L-V₁-L₁-V₂; Epitope1-L-Epitope2-L-Epitope3-V₁-L₁-V₂; Epitope1-L-Epitope2-L-Epitope3-L-V₁-L₁-V₂; L-Epitope1-L-Epitope2-L-Epitope3-V₁-L₁-V₂; L-Epitope1-L-Epitope2-L-Epitope3-L-V₁-L₁-V₂; V₁-L-Epitope1-L-V₂; L-Epitope1-L-V₁-L-Epitope2-L-V₂; V₁-L-Epitope1-L-V₂-L-Epitope2-L; V₁-L-Epitope1-L-V₂-L-Epitope2-L-Epitope3; V₁-L-Epitope1-L-V₂-L-Epitope2-Epitope3; V₁-L-Epitope1-L-V₂-L-Epitope2-L-Epitope3-Epitope4; L-Epitope1-L-V₁-L-Epitope2-L-V₂-L-Epitope3-L; Epitope1-L-V₁-L-Epitope2-L-V₂-L-Epitope3-L; L-Epitope1-L-V₁-L-Epitope2-L-V₂-L-Epitope3; L-Epitope1-L-V₁-L₁-V₂-L-Epitope2-L; L-Epitope1-L-V₁-L₁-V₂-L-Epitope2-L-Epitope3; L-Epitope1-L-V₁-L₁-V₂-L-Epitope2-Epitope3, or Epitope1-L-V₁-L₁-V₂-L-Epitope2-L-Epitope3-Epitope4 wherein
V₁ is V_{L} and V₂ is V_{H} or V₁ is V_{H} and V₂ is V_{L};
L₁ is any linker suitable to link the V_{H} chain to the V_{L} chain;
L is a linker comprising glycine and serine residues, and each occurrence of L in the extracellular binding domain can be identical or different to other occurrences of L in the same extracellular binding domain, and,
Epitope 1, Epitope 2 and Epitope 3 are mAb-specific epitopes and can be identical or different.
12a. The polypeptide according to 10a, wherein L₁ is a linker comprising Glycine and/or Serine.
13a. The polypeptide according to 12a, wherein L₁ is a linker comprising the amino acid sequence (Gly-Gly-Gly-Ser)ₙ or (Gly-Gly-Gly-Gly-Ser)ₙ, where n is 1, 2, 3, 4 or 5 or a linker comprising the amino acid sequence (Gly₄Ser)₄ or (Gly₄Ser)₃.
14a. The polypeptide according to any one of 10a to 13a wherein L is a linker comprising Glycine and/or Serine.
15a. The polypeptide according to 14a wherein L is a linker having an amino acid sequence selected from SGG, GGS, SGGS, SSGGS, GGGG, SGGGG, GGGGS, SGGGGS, GGGGGS, SGGGGGS, SGGGGG, GSGGGGS, GGGGGGGS, SGGGGGGG, SGGGGGGGS, or SGGGGSGGGGS.
16a. The polypeptide according to 14a wherein L is a SGGGG, GGGGS or SGGGGS.
17a. The polypeptide according to any one of 10a to 16a wherein Epitope 1, Epitope 2, Epitope 3 and Epitope 4 are independently selected from mAb-specific epitopes specifically recognized by ibritumomab, tiuxetan, muromonab-CD3, tositumomab, abciximab, basiliximab, brentuximab vedotin, cetuximab, infliximab, rituximab, alemtuzumab, bevacizumab, certolizumab pegol, daclizumab, eculizumab, efalizumab, gemtuzumab, natalizumab, omalizumab, palivizumab, ranibizumab, tocilizumab, trastuzumab, vedolizumab, adalimumab, belimumab, canakinumab, denosumab, golimumab, ipilimumab, ofatumumab, panitumumab, QBEND-10 and ustekinumab.

[0073] In a preferred embodiment said Epitope 1, Epitope 2, are specifically recognized by rituximab and epitope 3 is specifically recognized by QBEND-10.

18a. The polypeptide according to any one of 10a to 16a wherein Epitope 1, Epitope 2, Epitope 3 and Epitope 4 are independently selected from mAb-specific epitopes having an amino acid sequence of SEQ ID NO 161 to 170.
19a. The polypeptide according to any one of 10a to 18a wherein Epitope 1 is a mAb-specific epitope having an amino acid sequence of SEQ ID NO 161.
20a. The polypeptide according to any one of claims 10a to 19a wherein Epitope 2 is a mAb-specific epitope having an amino acid sequence of SEQ ID NO 161.
21a. The polypeptide according to any one of claims 10a to 20a wherein Epitope 3 is a mAb-specific epitope having an amino acid sequence of SEQ ID NO 161 or SEQ ID NO 169.
22a. The polypeptide according to any one of claims 10a to 21a wherein Epitope 4 is a mAb-specific epitope having an amino acid sequence of SEQ ID NO 161.
23a. The polypeptide according to claim 22a wherein Epitope 1, Epitope 2 and Epitope 4 are a mAb-specific epitope having an amino acid sequence of SEQ ID NO 161 and Epitope 3 is a mAb-specific epitope having an amino acid sequence of SEQ ID NO 169.
24a. The polypeptide according to anyone of 1a to 9a, wherein the mAb-specific epitope is from one polypeptide selected from those listed in Table 7.
25a. The polypeptide according to any one of 1a to 9a wherein the mAb-specific epitope is selected from mAb-specific epitopes specifically recognized by ibritumomab, tiuxetan, muromonab-CD3, tositumomab, abciximab, basiliximab, brentuximab vedotin, cetuximab, infliximab, rituximab, alemtuzumab, bevacizumab, certolizumab pegol, daclizumab, eculizumab, efalizumab, gemtuzumab, natalizumab, omalizumab, palivizumab, ranibizumab, tocilizumab, trastuzumab, vedolizumab, adalimumab, belimumab, canakinumab, denosumab, golimumab, ipilimumab, ofatumumab, panitumumab, QBEND-10 and ustekinumab.
26a. The polypeptide according to any one of 1a to 9a wherein the mAb-specific epitope is selected from mAb-specific epitope having an amino acid sequence of SEQ ID NO 161, SEQ ID NO 162, SEQ ID NO 163, SEQ ID NO 164, SEQ ID NO 165, SEQ ID NO 166, SEQ ID NO 167, SEQ ID NO 168, SEQ ID NO 169 or SEQ ID NO 170.
27a. The polypeptide according to any one of 1a to 9a wherein the mAb-specific epitope is has an amino acid sequence of SEQ ID NO 160.
28a. The polypeptide according to anyone of 1a to 27a, wherein said VH and VL chains have an antigenic target sequence of over 80% identity, preferably over 90%, and more preferably over 95% with SEQ ID NO 11 (CD123 antigen VH), SEQ ID NO 12 (CD123 antigen VL).
29a. The polypeptide according to any one of 1a to 27a wherein said CD123 antigen is a cell surface marker antigen.
30a. The polypeptide according to any one of 1a to 27a wherein said CD123 antigen is a tumor-associated surface antigen.
31a. The polypeptide according to any one of 1a to 27a wherein said antigen is CD123,
32a. The polypeptide according to any one of 1a to 27a wherein VH and VL are selected from a VH of SEQ ID NO 11, SEQ ID NO 24 to SEQ ID NO 30 and a VL of SEQ ID NO 12; SEQ ID NO 18 to SEQ ID NO 23.
33a. The polypeptide according to any one of 2a to 32a wherein the hinge comprises a CD8alpha hinge or a FcγRIII alpha hinge.
34a. The polypeptide according to any one of 2a to 3a3 wherein the transmembrane domain comprises the transmembrane region(s) CD8,
35a. The polypeptide according to any one of 2a to 33a wherein the transmembrane domain comprises the transmembrane region(s) of CD8 alpha.
36a. The polypeptide according to any one of 2a to 33a wherein the transmembrane domain comprises the transmembrane region(s) of CD8 alpha and a hinge from CD8 alpha.
37a. The polypeptide according to any one of 2a to 37a wherein the intracellular domain comprises a CD3zeta signaling domain.
38a. The polypeptide according to any one of 2a to 37a wherein the intracellular domain comprises a 4-1BB domain.
39a. A polypeptide according to anyone of 1a to 38a, wherein the CAR is a single-chain CAR.
40a. A polypeptide according to anyone of 1a to 38a wherein the CAR is a multi-chain CAR.
40a bis A polypeptide according to anyone of 1a to 39a wherein the CAR a sequence selected from SEQ ID NO 189 to SEQ ID NO 197.
41a. A polynucleotide encoding a polypeptide according to anyone of 1a to 40a.
42a. A polynucleotide encoding a chimeric antigen receptor according to anyone of 1a to 40a, wherein said CAR comprises a CD3 zeta signaling domain and co-stimulatory domain from 4-113B.
43a. An expression vector comprising a nucleic acid of 41a or 42a.
44a. An engineered immune cell expressing at its cell surface a polypeptide according to anyone of 1a to 40a.
45a. The engineered immune cell according to 44a, wherein said cell is derived from inflammatory T-lymphocytes, cytotoxic T-lymphocytes (CTL), regulatory T-lymphocytes or helper T-lymphocytes, preferably a CTL cell.
46a. The engineered immune cell according to 44a or 45a for use as a medicament.
47a. A method for engineering an immune cell of anyone of 44a-46a, comprising:
(a) Providing an immune cell;
(b) Introducing into said cell at least one polynucleotide encoding the chimeric antigen receptor according to anyone of 1a-40a.
(c) Expressing said polynucleotide into said cell.
48a. The method for engineering an immune cell of 47a, wherein immune cell is a T-cell.
49a. A method for in vitro sorting engineered immune cell expressing at its cell surface a polypeptide comprising at least one mAb-specific epitope according to anyone of claims 1a to 40a comprising
[0074] contacting a population of immune cells comprising said engineered immune cells with a monoclonal antibody specific for the mAb-specific epitope;
[0075] selecting the cells that bind to the monoclonal antibody to obtain a population of cells enriched in engineered immune cell.
   50a. The method according to 49a wherein the monoclonal antibody specific for the mAb-specific epitope is conjugated to a fluorophore and the step of selecting the cells that bind to the monoclonal antibody is done by Fluorescence Activated Cell Sorting (FACS).
   51a. The method according to 49a wherein the monoclonal antibody specific for the mAb-specific epitope is conjugated to a magnetic particle and the step of selecting the cells that bind to the monoclonal antibody is done by Magnetic Activated Cell Sorting (MACS).
   52a. The method according to any one of 49 to 51 wherein the polypeptide comprises an mAb-specific epitope having an amino acid sequence of SEQ ID NO 160 and the monoclonal antibody is rituximab.
   53a. The method according to any one of 49a to 51a wherein the polypeptide comprises an mAb-specific epitope having an amino acid sequence of SEQ ID NO 169 and the antibody used to contact the population of immune cells is QBEND-10.
   54a. The method according to any one of 49a to 53a wherein the population of cells enriched in engineered immune cell comprises at least 70%, 75%, 80%, 85%, 90%, 95% of CAR-expressing immune cells.
   55a. A method for in vivo depleting an engineered immune cell expressing at its cell surface a polypeptide comprising at least one mAb-specific epitope according to anyone of 1a to 40a in a patient, comprising contacting said engineered immune cell with at least one epitope-specific mAb.
   56a. The method according to 56a wherein the mAb-specific epitope is a CD20 epitope or mimotope and the epitope-specific mAb is rituximab.
   57a. The method according to 57a wherein the mAb-specific epitope has an amino acid sequence of SEQ ID NO 160.
   58a. The method according to any one of 56a to 58a wherein the epitope-specific mAb is conjugated with a molecule able to activate the complement system.
   59a. The method according to any one of 56a to 58a wherein, wherein a cytotoxic drug is coupled to the epitope-specific mAb.
   60a. A method for in vivo depleting an engineered immune cell expressing at its cell surface a polypeptide comprising at least one mAb-specific epitope according to anyone of 1a to 40a in a patient, comprising contacting said engineered immune cell with bi-specific mAb (BsAb) able to bind both the mAb-specific epitope borne on said cells and to an surface antigen borne on an effector (and cytotoxic) cell.
   61a. A method according to any one of 47a to 60a, wherein said immune cell is a T-cell.

[0076] specifically, the present invention also provides 1b a CD123 specific chimeric antigen receptor (CD123 CAR) comprising
[0077] an extracellular domain comprising an extra cellular ligand binding-domain comprising successively, a VH selected from SEQ ID NO 12, SEQ ID NO 24, SEQ ID NO 25, SEQ ID NO 26, SEQ ID NO 27, SEQ ID NO 28, SEQ ID NO 29 and SEQ ID NO 30, optionally humanized at least one linker, preferably a linker of sequence (GGGGS)n with n=1-4, more preferably n=3, and a VL selected from SEQ ID NO 11, SEQ ID NO 18, SEQ ID NO 19, SEQ ID NO 20, SEQ ID NO 21, SEQ ID NO 22 and SEQ ID NO 23, optionally humanized a hinge,
[0078] a transmembrane domain from CD8 alpha, and
[0079] a cytoplasmic domain including a CD3 zeta signaling domain and a co-stimulatory domain from 4-1BB.

[0080] A CD123 specific chimeric antigen receptor (CD123 CAR) comprising
[0081] an extracellular domain comprising an extra cellular ligand binding-domain comprising successively, a VH selected from SEQ ID NO 12, SEQ ID NO 24, SEQ ID NO 25, SEQ ID NO 26, SEQ ID NO 27, SEQ ID NO 28, SEQ ID NO 29 and SEQ ID NO 30, a linker of SEQ ID NO. 10, and a VL selected from SEQ ID NO 11, SEQ ID NO 18, SEQ ID NO 19, SEQ ID NO 20, SEQ ID NO 21, SEQ ID NO 22 and SEQ ID NO 23, a hinge,
[0082] a transmembrane domain from CD8 alpha, and
[0083] a cytoplasmic domain including a CD3 zeta signaling domain and a co-stimulatory domain from 4-1BB.
   2b the present invention provides a CD123 CAR according to 1b comprising no sequence having identity the human CD28 NP_006130.1.
   3b The present invention provides a CD123 CAR according to 1b or 2b wherein said extracellular domain comprises at least one epitope specific for a monoclonal antibody of sequence selected from SEQ ID NO 161 to SEQ ID NO 170, or a combination thereof, preferably at least one epitope specific for a monoclonal antibody of SEQ ID NO 161.

[0084] The present invention provides a CD123 CAR wherein the CD123 CAR comprises a sequence selected from SEQ ID NO 189 to SEQ ID NO 197.

[0085] The present invention provides a CD123 CAR wherein the CD123 CAR comprises a sequence of SEQ ID NO 190

[0086] The present invention provides a CD123 CAR wherein the CD123 CAR comprises a sequence of SEQ ID NO 191

[0087] The present invention provides a CD123 CAR wherein the CD123 CAR comprises a sequence of SEQ ID NO 192

[0088] The present invention provides a CD123 CAR wherein the CD123 CAR comprises a sequence of SEQ ID NO 193

[0089] The present invention provides a CD123 CAR wherein the CD123 CAR comprises a sequence of SEQ ID NO 194

[0090] The present invention provides a CD123 CAR wherein the CD123 CAR comprises a sequence of SEQ ID NO 195

[0091] The present invention provides a CD123 CAR wherein the CD123 CAR comprises a sequence of SEQ ID NO 196

[0092] The present invention provides a CD123 CAR wherein the CD123 CAR comprises a sequence of SEQ ID NO 197.

[0093] The present invention provides a CD123 CAR according to 1b or 2b wherein said extracellular domain comprises an scfv comprising at least one epitope specific for a monoclonal antibody of sequence selected from SEQ ID NO 161, SEQ ID NO 162, SEQ ID NO 163, SEQ ID NO 164, SEQ ID NO 165, SEQ ID NO 166, SEQ ID NO 167, SEQ ID NO 168 and SEQ ID NO 169, and SEQ ID NO 170.

[0094] Preferably, the present invention provides a CD123 CAR according to 1b or 2b wherein said extracellular domain comprises an scfv comprising two epitopes specific for a monoclonal antibody recognizing SEQ ID NO 161 and one other two epitopes specific for a monoclonal antibody recognizing SEQ ID NO 169.

4b. The present invention provides a CD123 CAR according to 3b comprising a sequence of SEQ ID NO 171.
5b The present invention provides a CD123 specific chimeric antigen receptor (CD123 CAR) according to 1b having a sequence selected from SEQ ID NO. 31, SEQ ID NO. 32, SEQ ID NO. 33 and SEQ ID No 34 to SEQ ID No 160.
6b The present invention provides a CD123 specific chimeric antigen receptor (CD123 CAR) according to any one of 1b to 5b having a sequence selected from SEQ ID No 34 to SEQ ID No 160.
7b The present invention provides a polynucleotide encoding a CD123 specific chimeric antigen receptor (CD123 CAR) according to any one of 1b to 6b.
8b The present invention provides an expression vector comprising a polynucleotide according to 7.
9b) The present invention provides an expression vector comprising a backbone and a sequence coding any one of the CD123 CAR defined in any one of 1b to 6b.
10b) The present invention provides an expression vector comprising a backbone, preferably a backbone comprising an EF1 promotor, an RQR8 open reading frame (RQR8 ORF), a sequence coding any one of the CD123 CAR of 1 to 8 embodiments above.
11b) The present invention provides a T Cell Receptor (TCR) knock-out (KO) or TCR and human deoxycytidine kinase (dCK) KO engineered immune cell expressing at the cell surface membrane a CD123 CAR according to any one of 1b to 9b.
12b) The present invention provides a TCR KO or TCR and dCK KO engineered immune cell comprising a polynucleotide coding a CD123 specific chimeric antigen receptor (CD123 CAR) according to any one of 1b to 6b.

[0095] A TCR KO or TCR and dCK KO engineered immune cell comprising an expression vector comprising a polynucleotide encoding a CD123 specific chimeric antigen receptor (CD123 CAR) of the invention.

[0096] A TCR KO or TCR and dCK KO engineered immune cell comprising an expression vector comprising a backbone and a sequence comprising a polynucleotide encoding a CD123 specific chimeric antigen receptor (CD123 CAR) of the invention.

[0097] A TCR KO or TCR and dCK KO engineered immune cell comprising an expression vector comprising a backbone, an EF1 promotor, an RQR8 open reading frame (RQR8 ORF), a sequence coding any one of the CD123 CAR of the invention.

13b) The present invention provides a TCR KO or TCR KO and dCK KO CD123 CAR-expressing engineered immune cell according to 11b or 12b further expressing a suicide domain at the cell surface.
(14b) The present invention provides a TCR KO or TCR KO and dCK KO CD123 CAR-expressing engineered immune T cell according to any one of 10b to 13b wherein said suicide domain at the cell surface is inserted into the CD123 CAR extracellular domain.

[0098] A TCR KO and dCK KO CD123 CAR-expressing engineered immune cell according to any one of 11b to 14b, wherein the dCK gene is deleted conferring resistance to purine nucleotide analogs (PNA).

(15b) The present invention provides a TCR KO or TCR KO and dCK KO CD123 CAR—expressing engineered immune cell according to any one of the 11b to 14b wherein expression of at least one MHC protein, is suppressed.
16b) The present invention provides a TCR KO or TCR KO and dCK KO CD123 CAR-expressing engineered immune cell according to any one of (11b) to (15b) for use in therapy.

[0099] The present invention provides a pharmaceutical composition comprising a CD123 CAR as in 1b) to 6b).

[0100] The present invention provides a pharmaceutical composition comprising a TCR KO or TCR KO and dCK KO CD123 CAR-expressing engineered immune cell according to any one of 11b to 15b.

17b) The present invention provides a TCR KO or TCR KO and dCK KO CD123 CAR-expressing engineered immune cell according to 16b wherein the condition is acute myelogenous leukemia (AML), preferably refractory/relapsed AML, BPDNL, or for use during bone marrow transplant.
18b) The present invention provides a TCR KO or TCR KO and dCK KO CD123 CAR-expressing engineered immune cell according to 16b, for use as a treatment, preferably as a treatment for a lymphoproliferative disorder, more preferably for leukemia of lymphoma or for a treatment selected from the group consisting of acute myelogenous leukemia, chronic myelogenous leukemia, myelodysplastic syndrome, acute lymphoid leukemia, chronic lymphoid leukemia, and myelodysplastic syndrome and BPDNL.

[0101] The present invention provides a pharmaceutical composition as above for use in therapy.

[0102] The present invention provides a pharmaceutical composition as above for use in therapy for the treatment of acute myelogenous leukemia (AML), preferably refractory/relapsed AML, BPDNL, or for use during bone marrow transplant.

[0103] The present invention provides a pharmaceutical composition for use as a treatment, preferably as a treatment for a lymphoproliferative disorder, more preferably for leukemia of lymphoma or for a treatment selected from the group consisting of acute myelogenous leukemia, chronic myelogenous leukemia, myelodysplastic syndrome, acute lymphoid leukemia, chronic lymphoid leukemia, and myelodysplastic syndrome and BPDNL.

[0104] Unless specifically defined herein, all technical and scientific terms used have the same meaning as commonly understood by a skilled artisan in the fields of gene therapy, pharmacology, immunology, biochemistry, genetics, and molecular biology.

[0105] All methods and materials similar or equivalent to those described herein can be used in the practice or testing of the present invention, with suitable methods and materials being described herein. All publications, patent applications, patents, and other references mentioned herein are incorporated by reference in their entirety. In case of conflict, the present specification, including definitions, will prevail. Further, the materials, methods, and examples are illustrative only and are not intended to be limiting, unless otherwise specified.

[0106] The practice of the present invention will employ, unless otherwise indicated, conventional techniques of cell biology, cell culture, molecular biology, transgenic biology, microbiology, recombinant DNA, and immunology, which are within the skill of the art. Such techniques are explained fully in the literature. See, for example, Current Protocols in Molecular Biology (Frederick M. AUSUBEL, 2000, Wiley and son Inc, Library of Congress, USA); Molecular Cloning: A Laboratory Manual, Third Edition, (Sambrook et al, 2001, Cold Spring Harbor, New York: Cold Spring Harbor Laboratory Press); Oligonucleotide Synthesis (M. J. Gait ed., 1984); Mullis et al. U.S. Pat. No. 4,683,195; Nucleic Acid Hybridization (B. D. Harries & S. J. Higgins eds. 1984); Transcription And Translation (B. D. Hames & S. J. Higgins eds. 1984); Culture Of Animal Cells (R. I. Freshney, Alan R. Liss, Inc., 1987); Immobilized Cells And Enzymes (IRL Press, 1986); B. Perbal, A Practical Guide To Molecular Cloning (1984); the series, Methods In ENZYMOLOGY (J. Abelson and M. Simon, eds.-in-chief, Academic Press, Inc., New York), specifically, Vols. 154 and 155 (Wu et al. eds.) and Vol. 185, “Gene Expression Technology” (D. Goeddel, ed.); Gene Transfer Vectors For Mammalian Cells (J. H. Miller and M. P. Calos eds., 1987, Cold Spring Harbor Laboratory); Immunochemical Methods In Cell And Molecular Biology (Mayer and Walker, eds., Academic Press, London, 1987); Handbook Of Experimental Immunology, Volumes I-IV (D. M. Weir and C. C. Blackwell, eds., 1986); and Manipulating the Mouse Embryo, (Cold Spring Harbor Laboratory Press, Cold Spring Harbor, N.Y., 1986).

[0107] The present invention discloses an engineered immune cell (TCR KO and/or dck KO) expressing a CD123 specific chimeric antigen receptor (“CD123 CAR” or “CAR”) comprising an extra cellular ligand binding-domain comprising a VH and a VL from a monoclonal anti-CD123 antibody KLON43 or humanized VH and humanized VL sequence thereof, a hinge from CD8 alpha of from FcγRIIIα, a transmembrane domain from CD8 alpha, a cytoplasmic domain including a CD3 zeta signaling domain and a co-stimulatory domain from 4-1BB, said 123 CAR having sequence identity with either SEQ ID NO. 31, SEQ ID NO. 32, or SEQ ID NO. 33, or any one of SEQ ID NO. 34 to SEQ ID NO. 117, SEQ ID NO. 160 or preferably, SEQ ID NO 188 to SEQ ID NO 197.

[0108] Preferably the present invention discloses an engineered immune cell (TCR KO and/or dck KO) expressing a CD123 specific CAR of SEQ ID No 31, 32 or 160, more preferably an engineered immune cell (TCR KO) expressing a CD123 specific CAR of SEQ ID No 31, and even more preferably an engineered immune cell (TCR KO and dck KO) expressing a CD123 specific CAR of SEQ ID No 32.

[0109] Advantageously said the present invention discloses an engineered immune cell (TCR KO and/or dck KO) expressing a CD123 specific CAR of SEQ ID No 31, 32 or 160 and a suicide domain, more preferably an engineered immune cell (TCR KO) expressing a CD123 specific CAR of SEQ ID No 31 and a suicide domain, and even more preferably an engineered immune cell (TCR KO and dck KO) expressing a CD123 specific CAR of SEQ ID No 32, and even more more preferably an engineered immune cell (TCR KO and dck KO) expressing a CD123 specific CAR of SEQ ID No 160, or of one of the following sequences SEQ ID NO 188 to SEQ ID NO 197.

[0110] The present invention discloses an engineered immune cell (TCR KO and/or dck KO) expressing a CD123 specific CAR having one of the polypeptide structure selected from V1, V3 as illustrated in FIG. 2, said structure comprising an extra cellular ligand binding-domain comprising VH and VL from a monoclonal anti-CD123 antibody KLON 43, a hinge from CD8alpha or FcγRIIIα, a transmembrane domain from CD8 alpha, a cytoplasmic domain including a CD3 zeta signaling domain and a co-stimulatory domain from 4-1BB, and no sequence from CD28 said 123 CAR having at least 80% sequence identity with either SEQ ID NO. 31, SEQ ID NO. 32, preferably SEQ ID NO. 32.

[0111] The present invention discloses an engineered immune cell (TCR KO and/or dck KO) expressing a CD123 specific CAR having one of the polypeptide structure selected from V1, V3 as illustrated in FIG. 2, said structure comprising an extra cellular ligand binding-domain comprising VH and VL from a monoclonal anti-CD123 antibody KLON 43, a hinge from CD8alpha or FcγRIIIα, a transmembrane domain from CD8 alpha, a cytoplasmic domain including a CD3 zeta signaling domain and a co-stimulatory domain from 4-1BB, and no sequence from CD28 said 123 CAR having at least 80% sequence identity with either SEQ ID NO. 34 to SEQ ID NO. 159, preferably SEQ ID NO. 34 to SEQ ID NO. 117, preferably SEQ ID NO. 76 to SEQ ID NO. 117.

[0112] In one embodiment the present invention discloses an engineered immune cell (TCR KO and/or dck KO) expressing a CD123 specific CAR having a sequence selected from SEQ ID NO. 34, SEQ ID NO. 76, SEQ ID NO. 36, SEQ ID NO. 78; SEQ ID NO. 37, SEQ ID NO. 79, SEQ ID NO. 41, SEQ ID NO. 83, SEQ ID NO. 42, SEQ ID NO. 8), SEQ ID NO. 43, SEQ ID NO. 85, SEQ ID NO. 46, SEQ ID NO. 47, SEQ ID NO. 48, SEQ ID NO. 49, SEQ ID NO. 88, SEQ ID NO. 89, SEQ ID NO. 90, SEQ ID NO. 91. SEQ ID NO. 52, SEQ ID NO. 53, SEQ ID NO. 54, SEQ ID NO. 55, SEQ ID NO. 94, SEQ ID NO. 95, SEQ ID NO. 96, SEQ ID NO. 97.

[0113] Preferably, the present invention discloses an engineered immune cell (TCR KO and/or dck KO) expressing a CD123 specific CAR having a sequence selected from SEQ ID NO. 34, SEQ ID NO. 76, SEQ ID NO. 36, SEQ ID NO. 78; SEQ ID NO. 43, SEQ ID NO. 85, SEQ ID NO. 46, SEQ ID NO. 47, SEQ ID NO. 48, SEQ ID NO. 88, SEQ ID NO. 89, SEQ ID NO. 90, SEQ ID NO. 52, SEQ ID NO. 53, SEQ ID NO. 54, SEQ ID NO. 55, SEQ ID NO. 94, SEQ ID NO. 95, SEQ ID NO. 96 SEQ ID NO. 97.

[0114] More preferably, the present invention discloses an engineered immune cell (TCR KO and/or dck KO) expressing a CD123 specific CAR having a sequence selected from SEQ ID NO. 47, SEQ ID NO. 89, SEQ ID NO. 52, SEQ ID NO. 53, SEQ ID NO. 54, SEQ ID NO. 55, SEQ ID NO. 94, SEQ ID NO. 95, SEQ ID NO. 96, SEQ ID NO. 97.

[0115] And even more preferably the present invention discloses an engineered immune cell (TCR KO and/or dck KO) expressing a CD123 specific 123 CAR having a sequence selected from SEQ ID NO. 32, SEQ ID NO. 89, SEQ ID NO. 94, SEQ ID NO. 95, SEQ ID NO. 96, SEQ ID NO. 97.

[0116] The most preferred embodiment the present invention discloses an engineered immune cell (TCR KO and/or dck KO) expressing a CD123 specific 123 CAR having a sequence of SEQ ID NO. 172 comprising at least one epitope recognized by a specific monoclonal antibody selected from SEQ ID NO. 161 to SEQ ID NO. 170, preferably two of SEQ ID NO 161 and one from SEQ ID NO 169.

[0117] Another most preferred embodiment discloses an engineered immune cell (TCR KO and/or dck KO) expressing a CD123 specific 123 CAR having a sequence of SEQ ID NO. 173 comprising at least one epitope recognized by a specific monoclonal antibody selected from SEQ ID NO. 161 to SEQ ID NO. 170, preferably two of SEQ ID NO 161 and one from SEQ ID NO 169.

[0118] Another most preferred embodiment discloses an engineered immune cell (TCR KO and/or dck KO) expressing a CD123 specific 123 CAR having a sequence of SEQ ID NO. 174 comprising at least one epitope recognized by a specific monoclonal antibody selected from SEQ ID NO. 161 to SEQ ID NO. 170, preferably two of SEQ ID NO 161 and one from SEQ ID NO 169.

[0119] Another most preferred embodiment discloses an engineered immune cell (TCR KO and/or dck KO) expressing a CD123 specific 123 CAR having a sequence of SEQ ID NO. 175 comprising at least one epitope recognized by a specific monoclonal antibody selected from SEQ ID NO. 161 to SEQ ID NO. 170, preferably two of SEQ ID NO 161 and one from SEQ ID NO 169.

[0120] Another most preferred embodiment discloses an engineered immune cell (TCR KO and/or dck KO) expressing a CD123 specific 123 CAR having a sequence of SEQ ID NO. 176 comprising at least one epitope recognized by a specific monoclonal antibody selected from SEQ ID NO. 161 to SEQ ID NO. 170, preferably two of SEQ ID NO 161 and one from SEQ ID NO 169.

[0121] Another most preferred embodiment discloses an engineered immune cell (TCR KO and/or dck KO) expressing a CD123 specific 123 CAR having a sequence of SEQ ID NO. 177 comprising at least one epitope recognized by a specific monoclonal antibody selected from SEQ ID NO. 161 to SEQ ID NO. 170, preferably two of SEQ ID NO 161 and one from SEQ ID NO 169.

[0122] Another most preferred embodiment discloses an engineered immune cell (TCR KO and/or dck KO) expressing a CD123 specific 123 CAR having a sequence of SEQ ID NO. 178 comprising at least one epitope recognized by a specific monoclonal antibody selected from SEQ ID NO. 161 to SEQ ID NO. 170, preferably two of SEQ ID NO 161 and one from SEQ ID NO 169.

[0123] Another most preferred embodiment discloses an engineered immune cell (TCR KO and/or dck KO) expressing a CD123 specific 123 CAR having a sequence of SEQ ID NO. 179 comprising at least one epitope recognized by a specific monoclonal antibody selected from SEQ ID NO. 161 to SEQ ID NO. 170, preferably two of SEQ ID NO 161 and one from SEQ ID NO 169.

[0124] Another most preferred embodiment discloses an engineered immune cell (TCR KO and/or dck KO) expressing a CD123 specific 123 CAR having a sequence of SEQ ID NO. 180 comprising at least one epitope recognized by a specific monoclonal antibody selected from SEQ ID NO. 161 to SEQ ID NO. 170, preferably two of SEQ ID NO 161 and one from SEQ ID NO 169.

[0125] Another most preferred embodiment discloses an engineered immune cell (TCR KO and/or dck KO) expressing a CD123 specific 123 CAR having a sequence of SEQ ID NO. 181 comprising at least one epitope recognized by a specific monoclonal antibody selected from SEQ ID NO. 161 to SEQ ID NO. 170, preferably two of SEQ ID NO 161 and one from SEQ ID NO 169.

[0126] Another most preferred embodiment discloses an engineered immune cell (TCR KO and/or dck KO) expressing a CD123 specific 123 CAR having a sequence of SEQ ID NO. 182 comprising at least one epitope recognized by a specific monoclonal antibody selected from SEQ ID NO. 161 to SEQ ID NO. 170, preferably two of SEQ ID NO 161 and one from SEQ ID NO 169.

[0127] Another most preferred embodiment discloses an engineered immune cell (TCR KO and/or dck KO) expressing a CD123 specific 123 CAR having a sequence of SEQ ID NO. 183 comprising at least one epitope recognized by a specific monoclonal antibody selected from SEQ ID NO. 161 to SEQ ID NO. 170, preferably two of SEQ ID NO 161 and one from SEQ ID NO 169.

[0128] Another most preferred embodiment discloses an engineered immune cell (TCR KO and/or dck KO) expressing a CD123 specific 123 CAR having a sequence of SEQ ID NO. 184 comprising at least one epitope recognized by a specific monoclonal antibody selected from SEQ ID NO. 161 to SEQ ID NO. 170, preferably two of SEQ ID NO 161 and one from SEQ ID NO 169.

[0129] Another most preferred embodiment discloses an engineered immune cell (TCR KO and/or dck KO) expressing a CD123 specific 123 CAR having a sequence of SEQ ID NO. 185 comprising at least one epitope recognized by a specific monoclonal antibody selected from SEQ ID NO. 161 to SEQ ID NO. 170, preferably two of SEQ ID NO 161 and one from SEQ ID NO 169.

[0130] Another most preferred embodiment discloses an engineered immune cell (TCR KO and/or dck KO) expressing a CD123 specific 123 CAR having a sequence of SEQ ID NO. 186 comprising at least one epitope recognized by a specific monoclonal antibody selected from SEQ ID NO. 161 to SEQ ID NO. 170, preferably two of SEQ ID NO 161 and one from SEQ ID NO 169.

[0131] Another most preferred embodiment discloses an engineered immune cell (TCR KO and/or dck KO) expressing a CD123 specific 123 CAR having a sequence of SEQ ID NO. 187 comprising at least one epitope recognized by a specific monoclonal antibody selected from SEQ ID NO. 161 to SEQ ID NO. 170, preferably two of SEQ ID NO 161 and one from SEQ ID NO 169.

[0132] In another most preferred embodiment the present invention discloses an engineered immune cell (TCR KO and/or dck KO) expressing a CD123 specific 123 CAR having a sequence of SEQ ID NO. 188

[0133] In another most preferred embodiment the present invention discloses an engineered immune cell (TCR KO and/or dck KO) expressing a CD123 specific 123 CAR having a sequence of SEQ ID NO. 189.

[0134] In another most preferred embodiment the present invention discloses an engineered immune cell (TCR KO and/or dck KO) expressing a CD123 specific 123 CAR having a sequence of SEQ ID NO. 190.

[0135] In another most preferred embodiment the present invention discloses an engineered immune cell (TCR KO and/or dck KO) expressing a CD123 specific 123 CAR having a sequence of SEQ ID NO. 191.

[0136] In another most preferred embodiment the present invention discloses an engineered immune cell (TCR KO and/or dck KO) expressing a CD123 specific 123 CAR having a sequence of SEQ ID NO. 192.

[0137] In another most preferred embodiment the present invention discloses an engineered immune cell (TCR KO and/or dck KO) expressing a CD123 specific 123 CAR having a sequence of SEQ ID NO. 193.

[0138] In another most preferred embodiment the present invention discloses an engineered immune cell (TCR KO and/or dck KO) expressing a CD123 specific 123 CAR having a sequence of SEQ ID NO. 194

[0139] In another most preferred embodiment the present invention discloses an engineered immune cell (TCR KO and/or dck KO) expressing a CD123 specific 123 CAR having a sequence of SEQ ID NO. 195.

[0140] In another most preferred embodiment the present invention discloses an engineered immune cell (TCR KO and/or dck KO) expressing a CD123 specific 123 CAR having a sequence of SEQ ID NO. 196.

[0141] In another most preferred embodiment the present invention discloses an engineered immune cell (TCR KO and/or dck KO) expressing a CD123 specific 123 CAR having a sequence of SEQ ID NO. 197.

[0142] The present invention discloses an engineered immune cell (TCR KO and/or dck KO) expressing a CD123 specific 123 CAR which extracellular binding domain is modified in such a way to allow both cell sorting and cell depletion. This structure named “mAb-driven sorting/depletion system” or “epitope specific for a monoclonal antibody” or “mimotope” is a selected epitope inserted within the extracellular domain of the anti-CD123 CAR of the invention, in particular into the anti-CD123 scFv; or between the TM and the hinge; this epitope having a specificity to be recognized by a specific antibody (preferably mAb). Given the fact that mainly the external ligand binding domain of the CAR is modified to include the epitope, different CAR architectures can be envisioned: single-chain or multi-chain. The chimeric scFv of the invention, which is formed of the VH and VL polypeptides and of the specific epitope(s) may itself have different structures depending on the position of insertion of the epitope and the use of linkers. The present invention also relates to the resulting method for sorting and/or depleting the engineered immune cells endowed with the modified CARs.

[0143] In some embodiments, the extracellular binding domain of the anti-CD123 CAR comprises the following sequence (including mimotopes) (Nterm is located on the left hand side):

V₁-L₁-V₂-(L)ₓ-Epitope1-(L)ₓ;
V₁-L₁-V₂-(L)ₓ-Epitope1-(L)ₓ-Epitope2-(L)ₓ;
V₁-L₁-V₂-(L)ₓ-Epitope1-(L)ₓ-Epitope2-(L)ₓ-Epitope3-(L)ₓ;
(L)ₓ-Epitope1-(L)ₓ-V₁-L₁-V₂;
(L)ₓ-Epitope1-(L)ₓ-Epitope2-(L)ₓ-V₁-L₁-V₂;
Epitope1-(L)ₓ-Epitope2-(L)ₓ-Epitope3-(L)ₓ-V₁-L₁-V₂;
(L)ₓ-Epitope1-(L)ₓ-V₁-L₁-V₂-(L)ₓ-Epitope2-(L)ₓ;
(L)ₓ-Epitope1-(L)ₓ-V₁-L₁-V₂-(L)ₓ-Epitope2-(L)ₓ-Epitope3-(L)ₓ;
(L)ₓ-Epitope1-(L)ₓ-V₁-L₁-V₂-(L)ₓ-Epitope2-(L)ₓ-Epitope3-(L)ₓ-Epitope4-(L)ₓ;
(L)ₓ-Epitope1-(L)ₓ-Epitope2-(L)ₓ-V₁-L₁-V₂-(L)ₓ-Epitope3-(L)ₓ;
(L)ₓ-Epitope1-(L)ₓ-Epitope2-(L)ₓ-V₁-L₁-V₂-(L)ₓ-Epitope3-(L)ₓ-Epitope4-(L)ₓ;
V₁-(L)ₓ-Epitope1-(L)ₓ-V₂;
V₁-(L)ₓ-Epitope1-(L)ₓ-V₂-(L)ₓ-Epitope2-(L)ₓ;
V₁-(L)ₓ-Epitope1-(L)ₓ-V₂-(L)ₓ-Epitope2-(L)ₓ-Epitope3-(L)ₓ;
V₁-(L)ₓ-Epitope1-(L)ₓ-V₂-(L)ₓ-Epitope2-(L)ₓ-Epitope3-(L)ₓ-Epitope4-(L)ₓ;
(L)ₓ-Epitope1-(L)ₓ-V₁-(L)ₓ-Epitope2-(L)ₓ-V₂;
(L)ₓ-Epitope1-(L)ₓ-V₁-(L)ₓ-Epitope2-(L)ₓ-V₂-(L)ₓ-Epitope3-(L)ₓ;
V₁-L₁-V₂-L-Epitope1;
V₁-L₁-V₂-L-Epitope1-L;
V₁-L₁-V₂-L-Epitope1-L-Epitope2;
V₁-L₁-V₂-L-Epitope1-L-Epitope2-L;
V₁-L₁-V₂-L-Epitope1-L-Epitope2-L-Epitope3;
V₁-L₁-V₂-L-Epitope1-L-Epitope2-L-Epitope3-L;
V₁-L₁-V₂-Epitope1;
V₁-L₁-V₂-Epitope1-L;
V₁-L₁-V₂-Epitope1-L-Epitope2;
V₁-L₁-V₂-Epitope1-L-Epitope2-L;
V₁-L₁-V₂-Epitope1-L-Epitope2-L-Epitope3;
V₁-L₁-V₂-Epitope1-L-Epitope2-L-Epitope3-L;
Epitope1-V₁-L₁-V₂;
Epitope1-L-V₁-L₁-V₂;
L-Epitope1-V₁-L₁-V₂;
L-Epitope1-L-V₁-L₁-V₂;
Epitope1-L-Epitope2-V₁-L₁-V₂;
Epitope1-L-Epitope2-L-V₁-L₁-V₂;
L-Epitope1-L-Epitope2-V₁-L₁-V₂;
L-Epitope1-L-Epitope2-L-V₁-L₁-V₂;
Epitope1-L-Epitope2-L-Epitope3-V₁-L₁-V₂;
Epitope1-L-Epitope2-L-Epitope3-L-V₁-L₁-V₂;
L-Epitope1-L-Epitope2-L-Epitope3-V₁-L₁-V₂;
L-Epitope1-L-Epitope2-L-Epitope3-L-V₁-L₁-V₂;
V₁-L-Epitope1-L-V₂;
L-Epitope1-L-V₁-L-Epitope2-L-V₂;
V₁-L-Epitope1-L-V₂-L-Epitope2-L;
V₁-L-Epitope1-L-V₂-L-Epitope2-L-Epitope3;
V₁-L-Epitope1-L-V₂-L-Epitope2-Epitope3;
V₁-L-Epitope1-L-V₂-L-Epitope2-L-Epitope3-Epitope4;
L-Epitope1-L-V₁-L-Epitope2-L-V₂-L-Epitope3-L;
Epitope1-L-V₁-L-Epitope2-L-V₂-L-Epitope3-L;
L-Epitope1-L-V₁-L-Epitope2-L-V₂-L-Epitope3;
L-Epitope1-L-V₁-L₁-V₂-L-Epitope2-L;
L-Epitope1-L-V₁-L₁-V₂-L-Epitope2-L-Epitope3;
L-Epitope1-L-V₁-L₁-V₂-L-Epitope2-Epitope3, or,
Epitope1-L-V₁-L₁-V₂-L-Epitope2-L-Epitope3-Epitope4.
wherein,
V₁ and V₂ are V_{H} and V_{L} of an ScFv anti-CD123 (i.e, V₁ is V_{L} and V₂ is V_{H} or V₁ is V_{H} and V₂ is V_{L});
L₁ is any linker suitable to link the VH chain to the VL chain in a ScFv;
L is a linker, preferably comprising glycine and serine residues, and each occurrence of L in the extracellular binding domain can be identical or different to other occurrence of L in the same extracellular binding domain, and,
x is 0 or 1 and each occurrence of x is independently from the others; and,
epitope 1, epitope 2 and epitope 3 are mAb-specific epitopes (or mimotopes) and can be identical or different.

[0144] In some embodiments, the extracellular binding domain comprises the following sequence (N-term is located on the left hand side):

V_{H}-L₁-V₁-L-Epitope1-L-Epitope2-L;
L-Epitope1-L-V_{H}-L-Epitope2-L-V₁-L-Epitope3-L;
V₁-L¹-V_{H}-L-Epitope1-L-Epitope2-L; or,
L-Epitope1-L-V₁-L-Epitope2-L-V_{H}-L-Epitope3-L.
wherein L, L1, epitope 1, epitope 2 and epitope 3 are as defined above.

[0145] L₁ is a linker comprising Glycine and/or Serine. In some embodiment, L₁ is a linker comprising the amino acid sequence (Gly-Gly-Gly-Ser)ₙ or (Gly-Gly-Gly-Gly-Ser)ₙ, where n is 1, 2, 3, 4 or 5. In some embodiments L₁ is (Gly₄Ser)₄ or (Gly₄Ser)₃.

[0146] L is a flexible linker, preferably comprising Glycine and/or Serine. In some embodiments, L has an amino acid sequence selected from SGG, GGS, SGGS, SSGGS, GGGG, SGGGG, GGGGS, SGGGGS, GGGGGS, SGGGGGS, SGGGGG, GSGGGGS, GGGGGGGS, SGGGGGGG, SGGGGGGGS, or SGGGGSGGGGS preferably SGG, SGGS, SSGGS, GGGG, SGGGGS, SGGGGGS, SGGGGG, GSGGGGS or SGGGGSGGGGS. In some embodiment, when the extracellular binding domain comprises several occurrences of L, all the Ls are identical. In some embodiments, when the extracellular binding domain comprises several occurrences of L, the Ls are not all identical. In some embodiments, L is SGGGGS, In some embodiments, the extracellular binding domain comprises several occurrences of L and all the Ls are SGGGGS.

[0147] In some embodiments, Epitope 1, Epitope 2 and Epitope 3 are identical or different and are selected from mAb-specific epitopes having an amino acid sequence as in Table 7.

[0148] In a preferred embodiments, Epitope 1, Epitope 2 are identical or different and are selected from mAb-specific epitopes specifically recognized by ibritumomab, tiuxetan, muromonab-CD3, tositumomab, abciximab, basiliximab, brentuximab vedotin, cetuximab, infliximab, rituximab, alemtuzumab, bevacizumab, certolizumab pegol, daclizumab, eculizumab, efalizumab, gemtuzumab, natalizumab, omalizumab, palivizumab, ranibizumab, tocilizumab, trastuzumab, vedolizumab, adalimumab, belimumab, canakinumab, denosumab, golimumab, ipilimumab, ofatumumab, panitumumab, QBEND-10, alemtuzumab or ustekinumab, preferably those already approved for medical use, such as rituximab as a non-limiting example.

[0149] Finally, the invention encompasses therapeutic methods where the number, activation and/or survival of the engineered immune cells endowed with a CAR is controlled by using an antibody that directly binds to at least one epitope specific for a monoclonal antibody in the CD123 CARs at the cell surface.

[0150] The present invention encompasses an embodiment disclosing an engineered immune cell (TCR KO and/or dck KO) expressing individually any one of the CD123 specific CAR discloses herein, preferably one of the following sequences SEQ ID NO 188 to SEQ ID NO 197.

[0151] The present invention encompasses an embodiment disclosing vectors encoding allowing the preparation of engineered immune cell (TCR KO and/or dck KO) expressing individually any (each) one of the CD123 specific CAR discloses above. In particular the present invention encompasses an embodiment disclosing vectors encoding (each) one of the CD123 specific CAR discloses above, preferably comprising a backbone.

[0152] The present invention encompasses an embodiment disclosing vectors encoding allowing the preparation of engineered immune cell (TCR KO and/or dck KO) expressing individually any (each) one of the CD123 specific CAR discloses above, preferably one of the following sequences SEQ ID NO 188 to SEQ ID NO 197.

[0153] The present invention encompasses an embodiment disclosing a pharmaceutical composition comprising an engineered immune cell (TCR KO and/or dck KO) expressing individually any (each) one of the CD123 specific CAR discloses above and a pharmaceutically acceptable vehicle.

[0154] The present invention encompasses an embodiment disclosing a pharmaceutical composition comprising an engineered immune cell (TCR KO and/or dck KO) expressing individually any (each) one of the CD123 specific CAR discloses above and a pharmaceutically acceptable vehicle for use as a medicament.

[0155] The present invention encompasses an embodiment disclosing a pharmaceutical composition comprising between from 104 to from 1010/kg engineered immune cells (TCR KO and/or dck KO) expressing individually any (each) one of the CD123 specific CAR discloses above and a pharmaceutically acceptable vehicle for use as a medicament.

[0156] The present invention discloses an engineered immune cell (TCR KO and/or dck KO) expressing a specific CD123 CAR having a polypeptide structure V3 as illustrated in FIG. 2, and described above wherein said CD123 CAR has at least 80% sequence identity with SEQ ID NO. 31.

[0157] The present invention discloses an engineered immune cell (TCR KO and/or dck KO) expressing a specific CD123 CAR having a polypeptide structure V3 as illustrated in FIG. 2, and described above wherein said CD123 CAR has at least 80% sequence identity with SEQ ID NO. 32.

[0158] The present invention discloses an engineered immune cell (TCR KO and/or dck KO) expressing a specific CD123 CAR having a polypeptide structure V3 as illustrated in FIG. 2, and described above wherein said CD123 CAR has at least 80% sequence identity with SEQ ID NO. 33.

[0159] The present invention discloses an engineered immune cell (TCR KO and/or dck KO) expressing a specific CD123 CAR having a polypeptide structure V3 as illustrated in FIG. 2, and described above wherein said CD123 CAR has at least 80% sequence identity with SEQ ID NO. 160.

[0160] The present invention discloses an engineered immune cell (TCR KO and/or dck KO) expressing a specific CD123 CAR having one of the following sequences SEQ ID NO 188 to SEQ ID NO 197.

[0161] The present invention discloses an engineered immune cell (TCR KO and/or dck KO) expressing a CD123 CAR as described above, wherein said extra cellular ligand binding-domain VH and VL from a monoclonal anti-CD123 antibody respectively comprise at least one of the following sequences:

(Variant VH1: SEQ ID NO. 24):
EVKLVESGGGLVQPGRSLRLSCTASGFTFTDYYMSWVRQAPGKGLEWVGL
IRSKADGYTTEYSASVKGRFTISRDDSKSILYLQMNSLKTEDTAVYYCAR
DAAYYSYYSPEGAMDYWGQGTLVTVSS,
(Variant VH2: SEQ ID NO. 25):
EVQLVESGGGLVQPGRSLRLSCTASGFTFTDYYMSWVRQAPGKGLEWVGL
IRSKADGYTTEYSASVKGRFTISRDDSKSILYLQMNSLKTEDTAVYYCAR
DAAYYSYYSPEGAMDYWGQGTLVTVSS,
(Variant VH3: SEQ ID NO. 26):
EVQLVESGGGLVQPGRSLRLSCTASGFTFTDYYMSWVRQAPGKGLEWVGL
IRSKADGYTTEYSASVKGRFTISRDDSKSIAYLQMNSLKTEDTAVYYCAR
DAAYYSYYSPEGAMDYWGQGTLVTVSS,
(Variant VH4: SEQ ID NO. 27):
EVQLVESGGGLVQPGRSLRLSCTASGFTFTDYYMSWVRQAPGKGLEWVGF
IRSKADGYTTEYSASVKGRFTISRDDSKSIAYLQMNSLKTEDTAVYYCAR
DAAYYSYYSPEGAMDYWGQGTLVTVSS,
(Variant VH5: SEQ ID NO. 28):
EVQLVESGGGLVQPGRSLRLSCTASGFTFTDYYMSWVRQAPGKGLEWVGF
IRSKADGYTTEYAASVKGRFTISRDDSKSIAYLQMNSLKTEDTAVYYCAR
DAAYYSYYSPEGAMDYWGQGTLVTVSS,
(Variant VH6: SEQ ID NO. 29):
EVQLVESGGGLVQPGRSLRLSCTASGFTFTDYYMSWVRQAPGKGLEWVGL
IRSKADGYTTEYAASVKGRFTISRDDSKSIAYLQMNSLKTEDTAVYYCAR
DAAYYSYYSPEGAMDYWGQGTLVTVSS,
(Variant VH7: SEQ ID NO. 30):
EVQLVESGGGLVQPGRSLRLSCTASGFTFTDYYMSWVRQAPGKGLEWVGF
IRSKADGYTTEYAASVKGRFTISRDDSKSIAYLQMNSLKTEDTAVYYCTR
DAAYYSYYSPEGAMDYWGQGTLVTVSS,
Variant VH8
EVKLVESGGGLVQPGRSLRLSCTASGFTFTDYYMSWVRQAPGKGLEWVGL
IRSKADGYTTEYSASVKGRFTISRDDSQSIAYLQMNSLKTEDTAVYYCAR
DAAYYSYYSPEGAMDYWGQGTLVTVSS
Variant VH9:
EVQLVESGGGLVQPGRSLRLSCTASGFTFTDYYMSWVRQAPGKGLEWVGL
IRSKADGYTTEYSASVKGRFTISRDDSQSIAYLQMNSLKTEDTAVYYCAR
DAAYYSYYSPEGAMDYWGQGTLVTVSS
Variant VH10:
EVQLVESGGGLVQPGRSLRLSCTASGFTFTDYYMSWVRQAPGKGLEWVGL
IRSKADGYTTEYAASVKGRFTISRDDSQSIAYLQMNSLKTEDTAVYYCAR
DAAYYSYYSPEGAMDYWGQGTLVTVSS
Variant VH11:
EVQLVESGGGLVQPGRSLRLSCTASGFTFTDYYMSWVRQAPGKGLEWVGL
IRSKADGYTTEYSASVKGRFTISRDDSQSIAYLQMNSLKTEDTAVYYCAR
DAAYYSYYSPEGAMDYWGQGTLVTVSS

and one of the following sequences:

Variant VL1: SEQ ID NO. 18):
MADYKDIVMTQSPSSVSASVGDRVTITCRASQNVDSAVAWYQQKPGKAPK
ALIYSASYRYSGVPSRFSGRGSGTDFTLTISSLQPEDFATYYCQQYYSTP
WTFGQGTKVEIKR,
Variant VL2: SEQ ID NO. 19):
MADYKDIQMTQSPSSVSASVGDRVTITCRASQNVDSAVAWYQQKPGKAPK
ALIYSASYRYSGVPSRFSGRGSGTDFTLTISSLQPEDFATYYCQQYYSTP
WTFGQGTKVEIKR,
Variant VL3: SEQ ID NO. 20):
MADYKDIQMTQSPSSVSASVGDRVTITCRASQNVDSAVAWYQQKPGKAPK
ALIYSASYRYSGVPSRFSGSGSGTDFTLTISSLQPEDFATYYCQQYYSTP
WTFGQGTKVEIKR,
Variant VL4: SEQ ID NO. 21):
MADYKDIQMTQSPSSVSASVGDRVTITCRASQNVDSAVAWYQQKPGKAPK
LLIYSASYRYSGVPSRFSGSGSGTDFTLTISSLQPEDFATYYCQQYYSTP
WTFGQGTKVEIKR,
Variant VL5: SEQ ID NO. 22):
MADYKDIQMTQSPSSVSASVGDRVTITCRASQNVDSAVAWYQQKPGKAPK
LLIYSASYRQSGVPSRFSGSGSGTDFTLTISSLQPEDFATYYCQQYYSTP
WTFGQGTKVEIKR,
and
Variant VL6: SEQ ID NO. 23):
MADYKDIQMTQSPSSVSASVGDRVTITCRASQNVDSAVAWYQQKPGKAPK
LLIYSASYGQSGVPSRFSGSGSGTDFTLTISSLQPEDFATYYCQQYYSTP
WTFGQGTKVEIKR,
Variant VL1a:
DIVMTQSPSSVSASVGDRVTITCRASQNVDSAVAWYQQKPGKAPKALIYS
ASYRYSGVPSRFSGRGSGTDFTLTISSLQPEDFATYYCQQYYSTPWTFGQ
GTKVEIKR
Variant VL2a:
DIQMTQSPSSVSASVGDRVTITCRASQNVDSAVAWYQQKPGKAPKALIYS
ASYRYSGVPSRFSGRGSGTDFTLTISSLQPEDFATYYCQQYYSTPWTFGQ
GTKVEIKR
Variant VL3a:
DIQMTQSPSSVSASVGDRVTITCRASQNVDSAVAWYQQKPGKAPKALIYS
ASYRYSGVPSRFSGSGSGTDFTLTISSLQPEDFATYYCQQYYSTPWTFGQ
GTKVEIKR
Variant VL4a:
DIQMTQSPSSVSASVGDRVTITCRASQNVDSAVAWYQQKPGKAPKLLIYS
ASYRYSGVPSRFSGSGSGTDFTLTISSLQPEDFATYYCQQYYSTPWTFGQ
GTKVEIKR
Variant VL6a:
DIQMTQSPSSVSASVGDRVTITCKASQNVDSAVAWYQQKPGKAPKLLIYS
ASYRYSGVPSRFSGSGSGTDFTLTISSLQPEDFATYYCQQYYSTPWTFGQ
GTKVEIKR
Variant VL7a:
DIQMTQSPSSVSASVGDRVTITCKASQNVDSAVAWYQQKPGKAPKALIYS
ASYRYSGVPSRFSGSGSGTDFTLTISSLQPEDLATYYCQQYYSTPWTFGQ
GTKVEIKR
Variant VL8a:
DIQMTQSPSSVSASVGDRVTITCRASQNVDSAVAWYQQKPGKAPKALIYS
ASYRYSGVPSRFSGSGSGTDFTLTISSLQPEDLATYYCQQYYSTPWTFGQ
GTKVEIKR
Variant VL9a:
DIQMTQSPSSVSASVGDRVTITCKASQNVDSAVAWYQQKPGKAPKALIYS
ASYRYSGVPDRFSGSGSGTDFTLTISSLQPEDLATYYCQQYYSTPWTFGQ
GTKVEIKR

[0162] The present invention discloses an engineered immune cell (TCR KO and/or dck KO) expressing a CD123 specific CAR as described above, wherein said extra cellular ligand binding-domain VH and VL from a monoclonal anti-CD123 antibody respectively comprise at least one of the following sequences:

(SEQ ID NO. 24)

EVKLVESGGGLVQPGRSLRLSCTASGFTFTDYYMSWVRQAPGKGLEWVGL
IRSKADGYTTEYSASVKGRFTISRDDSKSILYLQMNSLKTEDTAVYYCAR
DAAYYSYYSPEGAMDYWGQGTLVTVSS,

(SEQ ID NO. 25)

EVQLVESGGGLVQPGRSLRLSCTASGFTFTDYYMSWVRQAPGKGLEWVGL
IRSKADGYTTEYSASVKGRFTISRDDSKSILYLQMNSLKTEDTAVYYCAR
DAAYYSYYSPEGAMDYWGQGTLVTVSS,

(SEQ ID NO. 26)

EVQLVESGGGLVQPGRSLRLSCTASGFTFTDYYMSWVRQAPGKGLEWVGL
IRSKADGYTTEYSASVKGRFTISRDDSKSIAYLQMNSLKTEDTAVYYCAR
DAAYYSYYSPEGAMDYWGQGTLVTVSS,

(SEQ ID NO. 27)

EVQLVESGGGLVQPGRSLRLSCTASGFTFTDYYMSWVRQAPGKGLEWVGF
IRSKADGYTTEYSASVKGRFTISRDDSKSIAYLQMNSLKTEDTAVYYCAR
DAAYYSYYSPEGAMDYWGQGTLVTVSS,

(SEQ ID NO. 28)

EVQLVESGGGLVQPGRSLRLSCTASGFTFTDYYMSWVRQAPGKGLEWVGF
IRSKADGYTTEYAASVKGRFTISRDDSKSIAYLQMNSLKTEDTAVYYCAR
DAAYYSYYSPEGAMDYWGQGTLVTVSS,

(SEQ ID NO. 29)

EVQLVESGGGLVQPGRSLRLSCTASGFTFTDYYMSWVRQAPGKGLEWVGL
IRSKADGYTTEYAASVKGRFTISRDDSKSIAYLQMNSLKTEDTAVYYCAR
DAAYYSYYSPEGAMDYWGQGTLVTVSS,

(SEQ ID NO. 30)

EVQLVESGGGLVQPGRSLRLSCTASGFTFTDYYMSWVRQAPGKGLEWVGF
IRSKADGYTTEYAASVKGRFTISRDDSKSIAYLQMNSLKTEDTAVYYCTR
DAAYYSYYSPEGAMDYWGQGTLVTVSS,

(SEQ ID NO. 18)

MADYKDIVMTQSPSSVSASVGDRVTITCRASQNVDSAVAWYQQKPGKAPK
ALIYSASYRYSGVPSRFSGRGSGTDFTLTISSLQPEDFATYYCQQYYSTP
WTFGQGTKVEIKR,

(SEQ ID NO. 19)

MADYKDIQMTQSPSSVSASVGDRVTITCRASQNVDSAVAWYQQKPGKAPK
ALIYSASYRYSGVPSRFSGRGSGTDFTLTISSLQPEDFATYYCQQYYSTP
WTFGQGTKVEIKR,

(SEQ ID NO. 20)

MADYKDIQMTQSPSSVSASVGDRVTITCRASQNVDSAVAWYQQKPGKAPK
ALIYSASYRYSGVPSRFSGSGSGTDFTLTISSLQPEDFATYYCQQYYSTP
WTFGQGTKVEIKR,

(SEQ ID NO. 21)

MADYKDIQMTQSPSSVSASVGDRVTITCRASQNVDSAVAWYQQKPGKAPK
LLIYSASYRYSGVPSRFSGSGSGTDFTLTISSLQPEDFATYYCQQYYSTP
WTFGQGTKVEIKR,

(SEQ ID NO. 22)

MADYKDIQMTQSPSSVSASVGDRVTITCRASQNVDSAVAWYQQKPGKAPK
LLIYSASYRQSGVPSRFSGSGSGTDFTLTISSLQPEDFATYYCQQYYSTP
WTFGQGTKVEIKR,
and

(SEQ ID NO. 23)

MADYKDIQMTQSPSSVSASVGDRVTITCRASQNVDSAVAWYQQKPGKAPK
LLIYSASYGQSGVPSRFSGSGSGTDFTLTISSLQPEDFATYYCQQYYSTP
WTFGQGTKVEIKR, or a combination thereof.

[0163] Advantageously, the present invention discloses an engineered immune cell (TCR KO and/or dck KO) expressing a CD123 specific CAR as described above, wherein said extra cellular ligand binding-domain VH and VL from a monoclonal anti-CD123 antibody respectively comprise at least one of the following sequences:

(SEQ ID No 24)

EVKLVESGGGLVQPGRSLRLSCTASGFTFTDYYMSWVRQAPGKGLEWVGL
IRSKADGYTTEYSASVKGRFTISRDDSKSILYLQMNSLKTEDTAVYYCAR
DAAYYSYYSPEGAMDYWGQGTLVTVSS,.

(SEQ ID No 25)

EVQLVESGGGLVQPGRSLRLSCTASGFTFTDYYMSWVRQAPGKGLEWVGL
IRSKADGYTTEYSASVKGRFTISRDDSKSILYLQMNSLKTEDTAVYYCAR
DAAYYSYYSPEGAMDYWGQGTLVTVSS,.

(SEQ ID No 26)

EVQLVESGGGLVQPGRSLRLSCTASGFTFTDYYMSWVRQAPGKGLEWVGL
IRSKADGYTTEYSASVKGRFTISRDDSKSIAYLQMNSLKTEDTAVYYCAR
DAAYYSYYSPEGAMDYWGQGTLVTVSS,.

(SEQ ID No 27)

EVQLVESGGGLVQPGRSLRLSCTASGFTFTDYYMSWVRQAPGKGLEWVGF
IRSKADGYTTEYSASVKGRFTISRDDSKSIAYLQMNSLKTEDTAVYYCAR
DAAYYSYYSPEGAMDYWGQGTLVTVSS,.

(SEQ ID No 28)

EVQLVESGGGLVQPGRSLRLSCTASGFTFTDYYMSWVRQAPGKGLEWVGF
IRSKADGYTTEYAASVKGRFTISRDDSKSIAYLQMNSLKTEDTAVYYCAR
DAAYYSYYSPEGAMDYWGQGTLVTVSS,.

(SEQ ID No 29)

EVQLVESGGGLVQPGRSLRLSCTASGFTFTDYYMSWVRQAPGKGLEWVGL
IRSKADGYTTEYAASVKGRFTISRDDSKSIAYLQMNSLKTEDTAVYYCAR
DAAYYSYYSPEGAMDYWGQGTLVTVSS,.

(SEQ ID No 30)

EVQLVESGGGLVQPGRSLRLSCTASGFTFTDYYMSWVRQAPGKGLEWVGF
IRSKADGYTTEYAASVKGRFTISRDDSKSIAYLQMNSLKTEDTAVYYCTR
DAAYYSYYSPEGAMDYWGQGTLVTVSS,.

and at least one of the following sequences:

(SEQ ID NO 18)

MADYKDIVMTQSPSSVSASVGDRVTITCRASQNVDSAVAWYQQKPGKAPK
ALIYSASYRYSGVPSRFSGRGSGTDFTLTISSLQPEDFATYYCQQYYSTP
WTFGQGTKVEIKR,.

(SEQ ID NO 172)

GCSCRFPEEEEGGCELRVKFSRSADAPAYQQGQNQLYNELNLGRREEYDV
LDKRRGRDPEMGGKPRRKNPQEGLYNELQKDKMAEAYSEIGMKGERRRGK
GHDGLYQGLSTATKDTYDALHMQALPPR
huK43-VH9/VL6

(SEQ ID NO 173)

EVQLVESGGGLVQPGRSLRLSCTASGFTFTDYYMSWVRQAPGKGLEWVGL
IRSKADGYTTEYSASVKGRFTISRDDSQSIAYLQMNSLKTEDTAVYYCAR
DAAYYSYYSPEGAMDYWGQGTLVTVSSGGGGSGGGGSGGGGSDIQMTQSP
SSVSASVGDRVTITCKASQNVDSAVAWYQQKPGKAPKLLIYSASYRYSGV
PSRFSGSGSGTDFTLTISSLQPEDFATYYCQQYYSTPWTFGQGTKVEIKR
TTTPAPRPPTPAPTIASQPLSLRPEACRPAAGGAVHTRGLDFACDIYIWA
PLAGTCGVLLLSLVITLYCKRGRKKLLYIFKQPFMRPVQTTQEEDGCSCR
FPEEEEGGCELRVKFSRSADAPAYQQGQNQLYNELNLGRREEYDVLDKRR
GRDPEMGGKPRRKNPQEGLYNELQKDKMAEAYSEIGMKGERRRGKGHDGL
YQGLSTATKDTYDALHMQALPPR
huK43-VH10/VL3

(SEQ ID NO 174)

EVQLVESGGGLVQPGRSLRLSCTASGFTFTDYYMSWVRQAPGKGLEWVGL
IRSKADGYTTEYAASVKGRFTISRDDSQSIAYLQMNSLKTEDTAVYYCAR
DAAYYSYYSPEGAMDYWGQGTLVTVSSGGGGSGGGGSGGGGSDIQMTQSP
SSVSASVGDRVTITCRASQNVDSAVAWYQQKPGKAPKALIYSASYRYSGV
PSRFSGSGSGTDFTLTISSLQPEDFATYYCQQYYSTPWTFGQGTKVEIKR
TTTPAPRPPTPAPTIASQPLSLRPEACRPAAGGAVHTRGLDFACDIYIWA
PLAGTCGVLLLSLVITLYCKRGRKKLLYIFKQPFMRPVQTTQEEDGCSCR
FPEEEEGGCELRVKFSRSADAPAYQQGQNQLYNELNLGRREEYDVLDKRR
GRDPEMGGKPRRKNPQEGLYNELQKDKMAEAYSEIGMKGERRRGKGHDGL
YQGLSTATKDTYDALHMQALPPR
huK43-VH9/VL8

(SEQ ID NO 175)

EVQLVESGGGLVQPGRSLRLSCTASGFTFTDYYMSWVRQAPGKGLEWVGL
IRSKADGYTTEYSASVKGRFTISRDDSQSIAYLQMNSLKTEDTAVYYCAR
DAAYYSYYSPEGAMDYWGQGTLVTVSSGGGGSGGGGSGGGGSDIQMTQSP
SSVSASVGDRVTITCRASQNVDSAVAWYQQKPGKAPKALIYSASYRYSGV
PSRFSGSGSGTDFTLTISSLQPEDLATYYCQQYYSTPWTFGQGTKVEIKR
TTTPAPRPPTPAPTIASQPLSLRPEACRPAAGGAVHTRGLDFACDIYIWA
PLAGTCGVLLLSLVITLYCKRGRKKLLYIFKQPFMRPVQTTQEEDGCSCR
FPEEEEGGCELRVKFSRSADAPAYQQGQNQLYNELNLGRREEYDVLDKRR
GRDPEMGGKPRRKNPQEGLYNELQKDKMAEAYSEIGMKGERRRGKGHDGL
YQGLSTATKDTYDALHMQALPPR
huK43-VH2/VL3

(SEQ ID NO 176)

EVQLVESGGGLVQPGRSLRLSCTASGFTFTDYYMSWVRQAPGKGLEWVGL
IRSKADGYTTEYSASVKGRFTISRDDSKSILYLQMNSLKTEDTAVYYCAR
DAAYYSYYSPEGAMDYWGQGTLVTVSSGGGGSGGGGSGGGGSDIQMTQSP
SSVSASVGDRVTITCRASQNVDSAVAWYQQKPGKAPKALIYSASYRYSGV
PSRFSGSGSGTDFTLTISSLQPEDFATYYCQQYYSTPWTFGQGTKVEIKR
TTTPAPRPPTPAPTIASQPLSLRPEACRPAAGGAVHTRGLDFACDIYIWA
PLAGTCGVLLLSLVITLYCKRGRKKLLYIFKQPFMRPVQTTQEEDGCSCR
FPEEEEGGCELRVKFSRSADAPAYQQGQNQLYNELNLGRREEYDVLDKRR
GRDPEMGGKPRRKNPQEGLYNELQKDKMAEAYSEIGMKGERRRGKGHDGL
YQGLSTATKDTYDALHMQALPPR
huK43-VH10/VL9

(SEQ ID NO 177)

EVQLVESGGGLVQPGRSLRLSCTASGFTFTDYYMSWVRQAPGKGLEWVGL
IRSKADGYTTEYAASVKGRFTISRDDSQSIAYLQMNSLKTEDTAVYYCAR
DAAYYSYYSPEGAMDYWGQGTLVTVSSGGGGSGGGGSGGGGSDIQMTQSP
SSVSASVGDRVTITCKASQNVDSAVAWYQQKPGKAPKALIYSASYRYSGV
PDRFSGSGSGTDFTLTISSLQPEDLATYYCQQYYSTPWTFGQGTKVEIKR
TTTPAPRPPTPAPTIASQPLSLRPEACRPAAGGAVHTRGLDFACDIYIWA
PLAGTCGVLLLSLVITLYCKRGRKKLLYIFKQPFMRPVQTTQEEDGCSCR
FPEEEEGGCELRVKFSRSADAPAYQQGQNQLYNELNLGRREEYDVLDKRR
GRDPEMGGKPRRKNPQEGLYNELQKDKMAEAYSEIGMKGERRRGKGHDGL
YQGLSTATKDTYDALHMQALPPR
huK43-VH9/VL3

(SEQ ID NO 178)

EVQLVESGGGLVQPGRSLRLSCTASGFTFTDYYMSWVRQAPGKGLEWVGL
IRSKADGYTTEYSASVKGRFTISRDDSQSIAYLQMNSLKTEDTAVYYCAR
DAAYYSYYSPEGAMDYWGQGTLVTVSSGGGGSGGGGSGGGGSDIQMTQSP
SSVSASVGDRVTITCRASQNVDSAVAWYQQKPGKAPKALIYSASYRYSGV
PSRFSGSGSGTDFTLTISSLQPEDFATYYCQQYYSTPWTFGQGTKVEIKR
TTTPAPRPPTPAPTIASQPLSLRPEACRPAAGGAVHTRGLDFACDIYIWA
PLAGTCGVLLLSLVITLYCKRGRKKLLYIFKQPFMRPVQTTQEEDGCSCR
FPEEEEGGCELRVKFSRSADAPAYQQGQNQLYNELNLGRREEYDVLDKRR
GRDPEMGGKPRRKNPQEGLYNELQKDKMAEAYSEIGMKGERRRGKGHDGL
YQGLSTATKDTYDALHMQALPPR
huK43-VH2/VL1

(SEQ ID NO 179)

EVQLVESGGGLVQPGRSLRLSCTASGFTFTDYYMSWVRQAPGKGLEWVGL
IRSKADGYTTEYSASVKGRFTISRDDSKSILYLQMNSLKTEDTAVYYCAR
DAAYYSYYSPEGAMDYWGQGTLVTVSSGGGGSGGGGSGGGGSDIVMTQSP
SSVSASVGDRVTITCRASQNVDSAVAWYQQKPGKAPKALIYSASYRYSGV
PSRFSGRGSGTDFTLTISSLQPEDFATYYCQQYYSTPWTFGQGTKVEIKR
TTTPAPRPPTPAPTIASQPLSLRPEACRPAAGGAVHTRGLDFACDIYIWA
PLAGTCGVLLLSLVITLYCKRGRKKLLYIFKQPFMRPVQTTQEEDGCSCR
FPEEEEGGCELRVKFSRSADAPAYQQGQNQLYNELNLGRREEYDVLDKRR
GRDPEMGGKPRRKNPQEGLYNELQKDKMAEAYSEIGMKGERRRGKGHDGL
YQGLSTATKDTYDALHMQALPPR

[0164] In another embodiment the present invention provides an engineered immune cell endowed with the following CAR

V5
huK43-VH10/VL1

(SEQ ID NO 180)

EVQLVESGGGLVQPGRSLRLSCTASGFTFTDYYMSWVRQAPGKGLEWVGL
IRSKADGYTTEYAASVKGRFTISRDDSQSIAYLQMNSLKTEDTAVYYCAR
DAAYYSYYSPEGAMDYWGQGTLVTVSSGGGGSGGGGSGGGGSDIVMTQSP
SSVSASVGDRVTITCRASQNVDSAVAWYQQKPGKAPKALIYSASYRYSGV
PSRFSGRGSGTDFTLTISSLQPEDFATYYCQQYYSTPWTFGQGTKVEIKR
EPKSPDKTHTCPPCPAPPVAGPSVFLFPPKPKDTLMIARTPEVTCVVVDV
SHEDPEVKFNWYVDGVEVHNAKTKPREEQYNSTYRVVSVLTVLHQDWLNG
KEYKCKVSNKALPAPIEKTISKAKGQPREPQVYTLPPSRDELTKNQVSLT
CLVKGFYPSDIAVEWESNGQPENNYKTTPPVLDSDGSFFLYSKLTVDKSR
WQQGNVFSCSVMHEALHNHYTQKSLSLSPGKIYIWAPLAGTCGVLLLSLV
ITLYCKRGRKKLLYIFKQPFMRPVQTTQEEDGCSCRFPEEEEGGCELRVK
FSRSADAPAYQQGQNQLYNELNLGRREEYDVLDKRRGRDPEMGGKPRRKN
PQEGLYNELQKDKMAEAYSEIGMKGERRRGKGHDGLYQGLSTATKDTYDA
LHMQALPPR
huK43-VH9/VL6

(SEQ ID NO 181)

EVQLVESGGGLVQPGRSLRLSCTASGFTFTDYYMSWVRQAPGKGLEWVGL
IRSKADGYTTEYSASVKGRFTISRDDSQSIAYLQMNSLKTEDTAVYYCAR
DAAYYSYYSPEGAMDYWGQGTLVTVSSGGGGSGGGGSGGGGSDIQMTQSP
SSVSASVGDRVTITCKASQNVDSAVAWYQQKPGKAPKLLIYSASYRYSGV
PSRFSGSGSGTDFTLTISSLQPEDFATYYCQQYYSTSPWTFGQGTKVEIK
REPKSPDKTHTCPPCPAPPVAGPSVFLFPPKPKDTLMIARTPEVTCVVVD
VSHEDPEVKFNWYVDGVEVHNAKTKPREEQYNSTYRVVSVLTVLHQDWLN
GKEYKCKVSNKALPAPIEKTISKAKGQPREPQVYTLPPSRDELTKNQVSL
TCLVKGFYPSDIAVEWESNGQPENNYKTTPPVLDSDGSFFLYSKLTVDKS
RWQQGNVFSCSVMHEALHNHYTQKSLSLSPGKIYIWAPLAGTCGVLLLSL
VITLYCKRGRKKLLYIFKQPFMRPVQTTQEEDGCSCRFPEEEEGGCELRV
KFSRSADAPAYQQGQNQLYNELNLGRREEYDVLDKRRGRDPEMGGKPRRK
NPQEGLYNELQKDKMAEAYSEIGMKGERRRGKGHDGLYQGLSTATKDTYD
ALHMQALPPR
huK43-VH10/VL3

(SEQ ID NO 182)

EVQLVESGGGLVQPGRSLRLSCTASGFTFTDYYMSWVRQAPGKGLEWVGL
IRSKADGYTTEYAASVKGRFTISRDDSQSIAYLQMNSLKTEDTAVYYCAR
DAAYYSYYSPEGAMDYWGQGTLVTVSSGGGGSGGGGSGGGGSDIQMTQSP
SSVSASVGDRVTITCRASQNVDSAVAWYQQKPGKAPKALIYSASYRYSGV
PSRFSGSGSGTDFTLTISSLQPEDFATYYCQQYYSTSPWTFGQGTKVEIK
REPKSPDKTHTCPPCPAPPVAGPSVFLFPPKPKDTLMIARTPEVTCVVVD
VSHEDPEVKFNWYVDGVEVHNAKTKPREEQYNSTYRVVSVLTVLHQDWLN
GKEYKCKVSNKALPAPIEKTISKAKGQPREPQVYTLPPSRDELTKNQVSL
TCLVKGFYPSDIAVEWESNGQPENNYKTTPPVLDSDGSFFLYSKLTVDKS
RWQQGNVFSCSVMHEALHNHYTQKSLSLSPGKIYIWAPLAGTCGVLLLSL
VITLYCKRGRKKLLYIFKQPFMRPVQTTQEEDGCSCRFPEEEEGGCELRV
KFSRSADAPAYQQGQNQLYNELNLGRREEYDVLDKRRGRDPEMGGKPRRK
NPQEGLYNELQKDKMAEAYSEIGMKGERRRGKGHDGLYQGLSTATKDTYD
ALHMQALPPR
huK43-VH9/VL8

(SEQ ID NO 183)

EVQLVESGGGLVQPGRSLRLSCTASGFTFTDYYMSWVRQAPGKGLEWVGL
IRSKADGYTTEYSASVKGRFTISRDDSQSIAYLQMNSLKTEDTAVYYCAR
DAAYYSYYSPEGAMDYWGQGTLVTVSSGGGGSGGGGSGGGGSDIQMTQSP
SSVSASVGDRVTITCRASQNVDSAVAWYQQKPGKAPKALIYSASYRYSGV
PSRFSGSGSGTDFTLTISSLQPEDLATYYCQQYYSTPWTFGQGTKVEIKR
EPKSPDKTHTCPPCPAPPVAGPSVFLFPPKPKDTLMIARTPEVTCVVVDV
SHEDPEVKFNWYVDGVEVHNAKTKPREEQYNSTYRVVSVLTVLHQDWLNG
KEYKCKVSNKALPAPIEKTISKAKGQPREPQVYTLPPSRDELTKNQVSLT
CLVKGFYPSDIAVEWESNGQPENNYKTTPPVLDSDGSFFLYSKLTVDKSR
WQQGNVFSCSVMHEALHNHYTQKSLSLSPGKIYIWAPLAGTCGVLLLSLV
ITLYCKRGRKKLLYIFKQPFMRPVQTTQEEDGCSCRFPEEEEGGCELRVK
FSRSADAPAYQQGQNQLYNELNLGRREEYDVLDKRRGRDPEMGGKPRRKN
PQEGLYNELQKDKMAEAYSEIGMKGERRRGKGHDGLYQGLSTATKDTYDA
LHMQALPPR
huK43-VH2/VL3

(SEQ ID NO 184)

EVQLVESGGGLVQPGRSLRLSCTASGFTFTDYYMSWVRQAPGKGLEWVGL
IRSKADGYTTEYSASVKGRFTISRDDSKSILYLQMNSLKTEDTAVYYCAR
DAAYYSYYSPEGAMDYVGQGTLVTVSSGGGGSGGGGSGGGGSDIQMTQSP
SSVSASVGDRVTITCRASQNVDSAVAWYQQKPGKAPKALIYSASYRYSGV
PSRFSGSGSGTDFTLTISSLQPEDFATYYCQQYYSTPWTFGQGTKVEIKR
EPKSPDKTHTCPPCPAPPVAGPSVFLFPPKPKDTLMIARTPEVTCVVVDV
SHEDPEVKFNWYVDGVEVHNAKTKPREEQYNSTYRVVSVLTVLHQDWLNG
KEYKCKVSNKALPAPIEKTISKAKGQPREPQVYTLPPSRDELTKNQVSLT
CLVKGFYPSDIAVEWESNGQPENNYKTTPPVLDSDGSFFLYSKLTVDKSR
WQQGNVFSCSVMHEALHNHYTQKSLSLSPGKIYIWAPLAGTCGVLLLSLV
ITLYCKRGRKKLLYIFKQPFMRPVQTTQEEDGCSCRFPEEEEGGCELRVK
FSRSADAPAYQQGQNQLYNELNLGRREEYDVLDKRRGRDPEMGGKPRRKN
PQEGLYNELQKDKMAEAYSEIGMKGERRRGKGHDGLYQGLSTATKDTYDA
LHMQALPPR
huK43-VH10/VL9

(SEQ ID NO 185)

EVQLVESGGGLVQPGRSLRLSCTASGFTFTDYYMSWVRQAPGKGLEWVGL
TRSKADGYTTETAASVKGRFTISRDDSQSIAYLQMNSLKTEDTAVYYCAR
DAAYYSYYSPEGAMDYWGQGTLVTVSSGGGGSGGGGSGGGGSDIQMTQSP
SSVSASVGDRVTITCKASQNVDSAVAWYQQKPGKAPKALIYSASYRYSGV
PDRFSGSGSGTDFTLTISSLQPEDLATYYCQQYYSTPWTFGQGTKVEIKR
EPKSPDKTHTCPPCPAPPVAGPSVFLFPPKPKDTLMIARTPEVTCVVVDV
SHEDPEVKFNWYVDGVEVHNAKTKPREEQYNSTYRVVSVLTVLHQDWLNG
KEYKCKVSNKALPAPIEKTISKAKGQPREPQVYTLPPSRDELTKNQVSLT
CLVKGFYPSDIAVEWESNGQPENNYKTTPPVLDSDGSFFLYSKLTVDKSR
WQQGNVFSCSVMHEALHNHYTQKSLSLSPGKIYIWAPLAGTCGVLLLSLV
ITLYCKRGRKKLLYIFKQPFMRPVQTTQEEDGCSCRFPEEEEGGCELRVK
FSRSADAPAYQQGQNQLYNELNLGRREEYDVLDKRRGRDPEMGGKPRRKN
PQEGLYNELQKDKMAEAYSEIGMKGERRRGKGHDGLYQGLSTATKDTYDA
LHMQALPPR
huK43-VH9/VL3

(SEQ ID NO 186)

EVQLVESGGGLVQPGRSLRLSCTASGFTEFTDYYMSWVRQAPGKGLEWVG
LIRSKADGYTTEYSASVKGRFTISRDDSQSTAYLQMNSLKTEDTAVYYCA
RDAAYYSYYSPEGAMDYWGQGTLVTVSSGGGGSGGGGSGGGGSDIQMTQS
PSSVSASVGDRVTITCRASQNVDSAVAWYQQKPGKAPKALIYSASYRYSG
VPSRFSGSGSGTDFTLTISSLQPEDFATYYCQQYYSTPWTFGQGTKVEIK
REPKSPDKTFITCPPCPAPPVAGPSVFLFPPKPKDTLMIARTPEVTCVVV
DVSHEDPEVKFNWYVDGVEVHNAKTKPREEQYNSTYRVVSVLTVLHQDWL
NGKEYKCKVSNKALPAPIEKTISKAKGQPREPQVYTLPPSRDELTKNQVS
LTCLVKGFYPSDIAVEWESNGQPENNYKTTPPVLDSDGSFFLYSKLTVDK
SRWQQGNVFSCSVMHEALHNHYTQKSLSLSPGKIYIWAPLAGTCGVLLLS
LVITLYCKRGRKKLLYIFKQPFMRPVQTTQEEDGCSCRFPEEEEGGCELR
VKFSRSADAPAYQQGQNQLYNELNLGRREEYDVLDKRRGRDPEMGGKPRR
KNPQEGLYNELQKDKMAEAYSEIGMKGERRRGKGHDGLYQGLSTATKDTY
DALHMQALPPR
huK43-VH2/VL1

(SEQ ID NO 187)

EVQLVESGGGLVQPGRSLRLSCTASGETFTDYYMSWVRQAPGKGLEWVGL
IRSKADGYTTEYSASVKGRFTISRDDSKSILYLQMNSLKTEDTAVYYCAR
DAAYYSYYSPEGAMDYWGQGTLVTVSSGGGGSGGGGSGGGGSDIVMTQSP
SSVSASVGDRVTITCRASQNVDSAVAWYQQKPGKAPKALIYSASYRYSGV
PSRFSGRGSGTDFTLTISSLQPEDFATYYCQQYYSTPWTFGQGTKVEIKR
EPKSPDKTHTCPPCPAPPVAGPSVFLFPPKPKDTLMIARTPEVTCVVVDV
SHEDPEVKFNWYVDGVEVHNAKTKPREEQYNSTYRVVSVLTVLHQDWLNG
KEYKCKVSNKALPAPIEKTISKAKGQPREPQVYTLPPSRDELTKNQVSLT
CLVKGFYPSDIAVEWESNGQPENNYKTTPPVLDSDGSFFLYSKLTVDKSR
WQQGNVFSCSVMHEALHNHYTQKSLSLSPGKIYIWAPLAGTCGVLLLSLV
ITLYCKRGRKKLLYIFKQPFMRPVQTTQEEDGCSCRFPEEEEGGCELRVK
FSRSADAPAYQQGQNQLYNELNLGRREEYDVLDKRRGRDPEMGGKPRRKN
PQEGLYNELQKDKMAEAYSEIGMKGERRRGKGHDGLYQGLSTATKDTYDA
LHMQALPPR.

[0165] The present invention discloses an engineered immune cell (TCR KO and/or dck KO) expressing a CD123 specific CAR as described above, wherein said structure V3 (see FIG. 2) comprises a CD8 alpha hinge and a CD8 alpha transmembrane domain, preferably and no CD28 sequence.

[0166] The present invention discloses an engineered immune cell (TCR KO and/or dck KO) expressing a CD123 specific CAR as described above, wherein said structure V3 comprises a CD8 alpha hinge, a 4-1BB cytoplasmic domain and a CD8 alpha transmembrane domain.

[0167] The present invention discloses an engineered immune cell (TCR KO and/or dck KO) expressing a CD123 specific CAR as described above, wherein said structure V3 comprises a CD8 alpha hinge and a 4-1BB transmembrane domain and no sequence from CD28.

[0168] The present invention discloses an engineered immune cell expressing a CD123 specific CAR as above and further comprising another extracellular ligand binding domain which is not specific for CD123. In a preferred embodiment, another extracellular ligand binding domain which is not specific for CD123 is a suicide domain, more preferably more preferably a suicide domain as any one disclosed in patent application PA 2015 70044 table 2).

[0169] The present invention discloses an engineered immune cell (TCR KO and/or dck KO) expressing a CD123 specific CAR as described above, wherein said CD123 specific CAR comprises a suicide domain comprising at least one of SEQ ID NO.: 161, preferably at least two SEQ ID NO.: 161, bound by a linker Li comprising G and S.

[0170] In one embodiment said suicide domain is integrated into the hinge domain, of a CD123 CAR of the invention. In one more preferred embodiment, the present invention provides a CD123 CAR of SEQ ID NO.:160 or having at least 95% identity with SEQ ID NO:160.

[0171] Other suicide domains as those described in table 2 of patent application PA201570044 which is incorporated herein by reference in its entirety are suitable for the present invention.

[0172] The present invention discloses an engineered immune cell as above, wherein expression of at least one MHC protein, preferably β2m or HLA, is suppressed in said engineered immune cell. β2m stands for beta 2 microglobulin and HLA for human leukocyte antigen. The MHC protein is a MHC protein of Class I or of class II.

[0173] The present invention discloses an engineered immune cell as above, wherein said engineered immune cell is engineered to confer resistance to at least one immune suppressive drug, chemotherapy drug, or anti-cancer drug, preferably to purine analogs.

[0174] The present invention discloses a composition comprising a pharmaceutically acceptable vehicle and any one of the engineered immune cell (TCR KO and/or dck KO) expressing a CD123 specific CAR as described above.

[0175] The present invention discloses a composition comprising a pharmaceutically acceptable vehicle and any one of the engineered immune cell (TCR KO and/or dck KO) expressing a CD123 specific CAR as described above and another drug, preferably a purine analogues and more preferably a FLAG treatment.

[0176] Examples of purine analogues according to the invention may be pentostatin, fludarabine 2-deoxyadenosine, cladribine, clofarabine, Nelarabine, preferably pentostatin, fludarabine monophosphate, and 2-chlorodeoxyadenosine (2-CDA).

[0177] Examples of FLAG treatments that may be associated with the CD123 T cells of the invention are as follows: Standard FLAG without additions, FLAG-IDA, Mito-FLAG, FLAMSA.

[0178] An Example of FLAG treatment according to the invention may be Standard FLAG without additions

| Drug | Dose | | Mode | Days |
|---|---|---|---|---|
| (FL)udarabine | 30 | mg/m² | a IV infusion over | Days 1-5 |
| | | | 30 min, every 12 hours | |
| | | | in 2 day divided doses | |
| (A)ra-C | 2000 | mg/m² | IV infusion over 4 hours, | Days 1-5 |
| | | | every 12 hours in | |
| | | | 2 divided doses, starting | |
| | | | 4 hours after the end of | |
| | | | fludarabine infusion | |
| (G)-CSF | 5 | μg/kg | SC | From day 6 |
| | | | | till neutrophil |
| | | | | recovery |

FLAG-IDA

| | | | | |
|---|---|---|---|---|
| (FL)udarabine | 30 | mg/m² | a IV infusion over | Days 1-5 |
| | | | 30 min, every 12 hours | |
| | | | in 2 day divided doses | |
| | 2000 | mg/m² | a IV infusion over | Days 1-5 |
| (A)ra-C | | | 4 hours, every 12 hours | |
| | | | in 2 day divided doses, | |
| | | | starting 4 hours after the | |
| | | | end of fludarabine | |
| | | | infusion | |
| (IDA)rubicin | 10 | mg/m² | IV bolus | Days 1-3 |
| (G)-CSF | 5 | μg/kg | SC | From day 6 |
| | | | | till neutrophil |
| | | | | recovery |

Mito-FLAG

| | | | | |
|---|---|---|---|---|
| (FL)udarabine | 30 | mg/m² | IV infusion over 30 min, | Days 1-5 |
| | | | every 12 hours in | |
| | | | 2 divided doses | |
| (A)ra-C | 2000 | mg/m² | IV infusion over 3 hours, | Days 1-5 |
| | | | every 12 hours in | |
| | | | 2 divided doses, starting | |
| | | | 4 hours after the end of | |
| | | | fludarabine infusion | |
| (Mito)xantrone | 7 | mg/m² | IV infusion | Days 1, |
| | | | | 3 and 5 |
| (G)-CSF | 5 | μg/kg | SC | From day 6 |
| | | | | till neutrophil |
| | | | | recovery |

FLAMSA

| | | | | |
|---|---|---|---|---|
| (FL)udarabine | 30 | mg/m² | IV infusion over 30 min, | Days 1-4 |
| | | | every 12 hours in | |
| | | | 2 divided doses | |
| (A)ra-C | 2000 | mg/m² | IV infusion over 4 hours, | Days 1-4 |
| | | | every 12 hours in | |
| | | | 2 divided doses, starting | |
| | | | 4 hours after the end of | |
| | | | fiudarabine infusion | |
| (AMSA)crine | 100 | mg/m² | IV infusion | Days 1-4 |
| Filgrastim | 5 | μg/kg | SC | From |
| | | | | transplant day |
| | | | | (or from day 5 |
| | | | | if FLAMSA is |
| | | | | not a part of |
| | | | | conditioning) |
| | | | | till neutrophil |
| | | | | recovery |

[0179] The following combination treatments are disclosed herein:

[0180] The present invention discloses an engineered immune cell as any one described above, a composition comprising said engineered immune cell as disclosed above, for use in therapy.

[0181] The present invention discloses an engineered immune cell of the invention, a composition comprising said engineered immune cell as disclosed above, for use in therapy as above, wherein the patient is a human.

[0182] The present invention discloses an engineered immune cell, a composition comprising said engineered immune cell as disclosed above, for use in therapy as above, wherein the condition is a pre-malignant or malignant cancer condition characterized by CD123-expressing cells.

[0183] The present invention discloses an engineered immune cell, a composition comprising said engineered immune cell as disclosed above, for use in therapy as above, wherein the condition is a condition which is characterized by an overabundance of CD123-expressing cells.

[0184] The present invention discloses an engineered immune cell, a composition comprising said engineered immune cell as disclosed above, for use in therapy as above, wherein the malignant cancer condition is a haematological cancer condition.

[0185] The present invention discloses an engineered immune cell, a composition comprising said engineered immune cell as disclosed above, for use in therapy as above, wherein the haematological cancer condition is leukemia or malignant lymphoproliferative disorders.

[0186] The present invention discloses an engineered immune cell, a composition comprising said engineered immune cell as disclosed above, for use in therapy as above, wherein said leukemia is selected from the group consisting of acute myelogenous leukemia, chronic myelogenous leukemia, myelodysplastic syndrome, acute lymphoid leukemia, chronic lymphoid leukemia, and myelodysplastic syndrome.

[0187] The present invention discloses an engineered immune cell, a composition comprising said engineered immune cell as disclosed above, for use in therapy as above, wherein the leukemia is acute myelogenous leukemia (AML), preferably refractory/relapsed AML.

[0188] In one embodiment, the present invention discloses an engineered immune cell, a composition comprising said engineered immune cell as disclosed above, for use in therapy as above, wherein said hematologic cancer is a malignant lymphoproliferative disorder.

[0189] The present invention discloses an engineered immune cell for use in therapy as above, wherein said malignant lymphoproliferative disorder is lymphoma.

[0190] The present invention discloses an engineered immune cell for use in therapy as above, wherein said lymphoma is selected from the group consisting of multiple myeloma, non-Hodgkin's lymphoma, Burkitt's lymphoma, and follicular lymphoma (small cell and large cell).

[0191] CD123 CAR of SEQ ID No 31 or SEQ ID No 32 or SEQ ID No 160 expressed in TCR KO and dck KO T cells of the invention, from 10⁴ to 10⁸ cells/kg, in combination with a FLAG treatment without addition, for use in the treatment of AML, preferably refractory relapsed AML.

[0192] CD123 CAR of SEQ ID No 31 or SEQ ID No 32 or SEQ ID No 160 expressed in TCR KO and dck KO T cells of the invention, from 10⁴ to 10⁸ cells/kg, in combination with a FLAG treatment without addition, for use in the treatment of BPDCN.

[0193] CD123 CAR of SEQ ID No 31 or SEQ ID No 32 or SEQ ID No 160 expressed in TCR KO and dck KO T cells of the invention from 10⁴ to 10⁸ cells/kg in combination with a FLAG treatment without addition for use as a treatment before bone marrow transplant as a bridge of transplant.

[0194] CD123 CAR of SEQ ID No 31 or SEQ ID No 32 or SEQ ID No 160 expressed in TCR KO and dck KO T cells of the invention (from 104 to 108 cells/kg) in combination with fludarabine (from 20 mg/kg to 50 mg/kg), for use in the treatment of AML, preferably refractory relapsed AML.

[0195] CD123 CAR of SEQ ID No 31 or SEQ ID No 32 or SEQ ID No 160 expressed in TCR KO and dck KO T cells of the invention (from 10⁴ to 10⁸ cells/kg) in combination with fludarabine (from 20 mg/kg to 50 mg/kg), for use in the treatment of BPDCN.

[0196] CD123 CAR of SEQ ID No 31 or SEQ ID No 32 or SEQ ID No 160 expressed in TCR KO and dck KO T cells of the invention (from 104 to 108 cells/kg) in combination with fludarabine (from 20 mg/kg to 50 mg/kg), for use as a treatment before bone marrow transplant as a bridge of transplant.

[0197] The present invention discloses a method of impairing a hematologic cancer cell comprising contacting said hematologic cancer cell with an engineered cell according to the invention in an amount effective to cause impairment of said cancer cell (from 10⁴ to 10⁸ cells/kg).

[0198] The present invention discloses a method of engineering an immune cell comprising:
[0199] 1. Providing an immune cell from a donor,
[0200] 2. Knocking out the TCR gene,
[0201] 3. Expressing at the surface of said cell at the CD123 specific chimeric antigen receptor according to the invention as any one of the above.

[0202] A donor may the patient suffering a cancer himself (for autologous adoptive transfer) or another individual (for adoptive transfer of allogenic T cells). The present invention discloses a method of engineering an immune cell as above comprising:
[0203] 1. Providing an immune cell from a donor,
[0204] 2. Knocking out the TCR gene, and the dck gene
[0205] 3. Expressing at the surface of said cell the CD123 specific chimeric antigen receptor according to any one of the above by introducing into said cell at least one polynucleotide encoding said CD123 specific chimeric antigen receptor,

[0206] In a more preferred embodiment, said method comprises expressing at the cell surface a suicide domain.

[0207] The present invention discloses a method of engineering an immune cell as above comprising:
[0208] 1. Providing an immune cell,
[0209] 2. Knocking out a TCR gene, using half TALE-nuclease TALEN of SEQ ID NO: 16 and SEQ ID NO: 17 and the dck gene
[0210] 3. Expressing at the surface of said cell any one of CD123 specific chimeric antigen receptor according to the above by introducing into said cell at least one polynucleotide encoding said CD123 specific chimeric antigen receptor.

[0211] In a preferred embodiment, said method comprises expressing at the cell surface a suicide domain, preferably a suicide domain recognized by one of the following antibodies ibritumomab, tiuxetan, muromonab-CD3, tositumomab, abciximab, basiliximab, brentuximab vedotin, cetuximab, infliximab, rituximab, alemtuzumab, bevacizumab, certolizumab pegol, daclizumab, eculizumab, efalizumab, gemtuzumab, natalizumab, omalizumab, palivizumab, ranibizumab, tocilizumab, trastuzumab, vedolizumab, adalimumab, belimumab, canakinumab, denosumab, golimumab, ipilimumab, ofatumumab, panitumumab, QBEND-10 and ustekinumab.

[0212] In another embodiment said method further comprises a step of binding said engineered immune cell of the invention to a specific monoclonal antigen as those disclosed herein selected from ibritumomab, tiuxetan, muromonab-CD3, tositumomab, abciximab, basiliximab, brentuximab vedotin, cetuximab, infliximab, rituximab, alemtuzumab, bevacizumab, certolizumab pegol, daclizumab, eculizumab, efalizumab, gemtuzumab, natalizumab, omalizumab, palivizumab, ranibizumab, tocilizumab, trastuzumab, vedolizumab, adalimumab, belimumab, canakinumab, denosumab, golimumab, ipilimumab, ofatumumab, panitumumab, QBEND-10 and ustekinumab.

[0213] The present invention discloses a method of treating a subject in need thereof comprising:
[0214] 1. Providing an immune cell expressing at the surface a CD123 specific Chimeric Antigen Receptor according to any one of the above or a composition comprising it
[0215] 2. Administrating said immune cells to said patient. In a preferred embodiment, said composition further comprises a purine analogue, fludarabine

[0216] In another embodiment, said composition is associated to a FLAG treatment, a FLAG treatment without addition.

[0217] In one embodiment said subject in need thereof suffers AML, preferably refractory relapsed AML, BPDNL, or must have bone marrow transplantation.

[0218] The present invention discloses a method of treating a subject in need thereof as above, wherein an immune cell is provided from a donor.

[0219] The present invention discloses a method of treating a subject in need thereof as above, wherein said immune cell is provided from the patient himself.

### CD123 Specific Chimeric Antigen Receptors

[0220] The present invention relates to new anti-CD123 chimeric antigen receptor (CAR) comprising an extracellular ligand-binding domain from or derived from KLON 43 antibody, a transmembrane domain from CD8 alpha, a hinge from CD8 alpha or from FcγRIIIα, a suicide domain and a signaling transducing domain. In a preferred embodiment said suicide domain is integrated into the hinge domain. In a more preferred embodiment said suicide domain comprises at least two sequences of SEQ ID NO 161 integrated into the hinge domain.

[0221] In a preferred embodiment, said anti-CD123 CAR of the invention is a polypeptide of SEQ ID NO.: 31, 32, or 160,

[0222] In another embodiment, said anti-CD123 CAR of the invention is a polypeptide of SEQ ID NO.: 34 to SEQ ID NO.:159, SEQ ID NO.:34 to SEQ ID NO.:117, SEQ ID NO.:76 to SEQ ID NO.:117.

[0223] The term “extracellular ligand-binding domain” as used herein is defined as an oligo- or polypeptide that is capable of binding CD123. Preferably, the extracellular ligand-binding domain may be chosen to recognize CD123 that acts as a cell surface marker on target cells associated with a particular disease state. More preferably, the extracellular ligand-binding domain may be chosen to recognize CD123 that acts as a cell surface marker on target cells associated with AML, BPDCN or a CD123-expressing cell involved in a cancer state.

[0224] In a preferred embodiment, said extracellular ligand-binding domain comprises a single chain antibody fragment (scFv) comprising the light (VL) and the heavy (VH) variable fragment of a target antigen specific monoclonal anti CD-123 antibody KLON 43 joined by a flexible linker. Said V_{L} and VH are preferably selected from the sequences disclosed in Table 1 to 2, more preferably an scfv comprising a VH, a linker and VL from or derived from Klon43 (humanized VH and VL as described in table 2). They are preferably linked together by a flexible linker of sequence (GGGGS)n wherein n=1 to 4, more preferably n=3 comprising the sequence SEQ ID NO. 10. In other words, said CARs preferentially comprise an extracellular ligand-biding domain comprising a polypeptide sequence 100% identity with an amino acid sequence selected from the group consisting of SEQ ID NO: 12 for VH and SEQ ID NO: 11 for VL and SEQ ID NO: 18 to SEQ ID NO: 30 for humanized fragments (see Table 2).

[0225] By the term “recombinant antibody” as used herein, is meant an antibody or antibody fragment which is generated using recombinant DNA technology, such as, for example, an antibody or antibody fragment expressed by a bacteriophage, a yeast expression system or a mammalian cell expression system. The term should also be construed to mean an antibody or antibody fragment which has been generated by the synthesis of a DNA molecule encoding the antibody or antibody fragment and which DNA molecule expresses an antibody or antibody fragment protein, or an amino acid sequence specifying the antibody or antibody fragment, wherein the DNA or amino acid sequence has been obtained using recombinant or synthetic DNA or amino acid sequence technology which is available and well known in the art.

[0226] As used herein, the term “conservative sequence modifications” or “humanization” or “humanized antibody” or “humanized antibody fragment”, “humanized VH or humanized VL” is intended to refer to amino acid modifications that do not significantly affect or alter the binding characteristics of the CAR and/or that do not significantly affect the activity of the CAR containing the modified amino acid sequence and reduce or abolish a human anti-mouse antibody (HAMA) response.

[0227] In a preferred embodiment, amino acid modifications significantly improve the binding characteristics of the CAR and/or significantly improve the activity of the CAR containing the modified amino acid sequence and reduce or abolish a human anti-mouse antibody (HAMA) response.

[0228] Such conservative modifications include amino acid substitutions, additions and deletions in said antibody fragment in said CAR and/or any of the other parts of said CAR molecule. Modifications can be introduced into an antibody, into an antibody fragment or in any of the other parts of the CAR molecule of the invention by standard techniques known in the art, such as site-directed mutagenesis, PCR-mediated mutagenesis or by employing optimized germline sequences.

[0229] Conservative amino acid substitutions are ones in which the amino acid residue is replaced with an amino acid residue having a similar side chain. Families of amino acid residues having similar side chains have been defined in the art. These families include amino acids with basic side chains (e.g., lysine, arginine, histidine), acidic side chains (e.g., aspartic acid, glutamic acid), uncharged polar side chains (e.g., glycine, asparagine, glutamine, serine, threonine, tyrosine, cysteine, tryptophan), nonpolar side chains (e.g., alanine, valine, leucine, isoleucine, proline, phenylalanine, methionine), beta-branched side chains (e.g., threonine, valine, isoleucine) and aromatic side chains (e.g., tyrosine, phenylalanine, tryptophan, histidine). Thus, one or more amino acid residues within a CAR of the invention can be replaced with other amino acid residues from the same side chain family and the altered CAR can be tested for the ability to bind CD 123 using the functional assays described herein.

[0230] In one embodiment said scfv comprises at least one, preferably two epitopes binding to a monoclonal antibody. Examples of such epitopes are disclosed in table 7.

[0231] The signal transducing domain or intracellular signaling domain of a CAR according to the present invention is responsible for intracellular signaling following the binding of extracellular ligand binding domain to the target resulting in the activation of the immune cell and immune response. In other words, the signal transducing domain is responsible for the activation of at least one of the normal effector functions of the immune cell in which the CAR is expressed. For example, the effector function of a T cell can be a cytolytic activity or helper activity including the secretion of cytokines. Thus, the term “signal transducing domain” refers to the portion of a protein which transduces the effector signal function signal and directs the cell to perform a specialized function.

[0232] Preferred examples of signal transducing domain for use in a CAR can be the cytoplasmic sequences of the T cell receptor and co-receptors that act in concert to initiate signal transduction following antigen receptor engagement, as well as any derivate or variant of these sequences and any synthetic sequence that has the same functional capability. Signal transduction domain comprises two distinct classes of cytoplasmic signaling sequence, those that initiate antigen-dependent primary activation, and those that act in an antigen-independent manner to provide a secondary or co-stimulatory signal. Primary cytoplasmic signaling sequence can comprise signaling motifs which are known as immunoreceptor tyrosine-based activation motifs of ITAMs. ITAMs are well defined signaling motifs found in the intracytoplasmic tail of a variety of receptors that serve as binding sites for syk/zap70 class tyrosine kinases. Examples of ITAM used in the invention can include as non limiting examples those derived from TCRzeta, FcRgamma, FcRbeta, FcRepsilon, CD3gamma, CD3delta, CD3epsilon, CD5, CD22, CD79a, CD79b and CD66d. In a preferred embodiment, the signaling transducing domain of the CAR can comprise the CD3zeta signaling domain which has amino acid sequence with at least 70%, preferably at least 80%, more preferably at least 90%, 95% 97% or 99% or 100% sequence identity with amino acid sequence selected from the group consisting of SEQ ID NO: 9.

[0233] In particular embodiment the signal transduction domain of the CAR of the present invention comprises a co-stimulatory signal molecule. A co-stimulatory molecule is a cell surface molecule other than an antigen receptor or their ligands that is required for an efficient immune response. “Co-stimulatory ligand” refers to a molecule on an antigen presenting cell that specifically binds a cognate co-stimulatory molecule on a T-cell, thereby providing a signal which, in addition to the primary signal provided by, for instance, binding of a TCR/CD3 complex with an MHC molecule loaded with peptide, mediates a T cell response, including, but not limited to, proliferation activation, differentiation and the like. A co-stimulatory ligand can include but is not limited to CD7, B7-1 (CD80), B7-2 (CD86), PD-L1, PD-L2, 4-1BBL, OX40L, inducible costimulatory ligand (ICOS-L), intercellular adhesion molecule (ICAM, CD30L, CD40, CD70, CD83, HLA-G, MICA, M1CB, HVEM, lymphotoxin beta receptor, 3/TR6, ILT3, ILT4, an agonist or antibody that binds Toll ligand receptor and a ligand that specifically binds with B7-H3. A co-stimulatory ligand also encompasses, inter alia, an antibody that specifically binds with a co-stimulatory molecule present on a T cell, such as but not limited to, CD27, CD28, 4-1BB, OX40, CD30, CD40, PD-1, ICOS, lymphocyte function-associated antigen-1 (LFA-1), CD2, CD7, LIGHT, NKG2C, B7-H3, a ligand that specifically binds with CD83. A “co-stimulatory molecule” refers to the cognate binding partner on a T-cell that specifically binds with a co-stimulatory ligand, thereby mediating a co-stimulatory response by the cell, such as, but not limited to proliferation. Co-stimulatory molecules include, but are not limited to an MHC class I molecule, BTLA and Toll ligand receptor. Examples of costimulatory molecules include CD27, CD28, CD8, 4-1BB (CD137), OX40, CD30, CD40, PD-1, ICOS, lymphocyte function-associated antigen-1 (LFA-1), CD2, CD7, LIGHT, NKG2C, B7-H3 and a ligand that specifically binds with CD83.

[0234] In one embodiment, the signal transduction domain of the CAR of the present invention in particular the co-stimulatory molecules do not include and CD28 (NP_006130.1).

[0235] In one preferred embodiment, the CAR of the present invention does not include a sequence of human CD28 (NP_006130.1) and/or from any other CD28.

[0236] In another preferred embodiment, the signal transduction domain of the CAR of the present invention comprises a part of co-stimulatory signal molecule selected from the group consisting of fragments of 4-1BB (GenBank: AAA53133.). In particular the signal transduction domain of the CAR of the present invention comprises amino acid sequence which comprises at least 70%, preferably at least 80%, more preferably at least 90%, 95% 97% or 99% sequence identity with amino acid sequence selected from the group consisting of SEQ ID NO: 8.

[0237] A CAR according to the present invention is expressed on the surface membrane of the cell. Thus, such CAR further comprises a transmembrane domain. The distinguishing features of appropriate transmembrane domains comprise the ability to be expressed at the surface of a cell, preferably in the present invention an immune cell, in particular lymphocyte cells or Natural killer (NK) cells, and to interact together for directing cellular response of immune cell against a predefined target cell. The transmembrane domain can be derived either from a natural or from a synthetic source. The transmembrane domain can be derived from any membrane-bound or transmembrane protein. As non-limiting examples, the transmembrane polypeptide can be a subunit of the T-cell receptor such as α, β, γ or δ, polypeptide constituting CD3 complex, IL2 receptor p55 (α chain), p75 (β chain) or γ chain, subunit chain of Fc receptors, in particular Fcγ receptor III or CD proteins. Alternatively the transmembrane domain can be synthetic and can comprise predominantly hydrophobic residues such as leucine and valine.

[0238] In a preferred embodiment said transmembrane domain (TM) is derived from the human CD8 alpha chain (e.g. NP_001139345.1), IgG1, IgG4, FcγRIIIα.

[0239] In a more preferred embodiment said TM domain comprises a sequence or part of the SEQ ID NO 6. A CD123 CAR according to the invention generally further comprises a transmembrane domain (TM) from CD8α, showing at least 90%, 91%, 92%, 93%, 94%, 95%, 96%, 97%, 98%, 99% or 100% identity with the polypeptides of SEQ ID NO. 6.

[0240] In one embodiment the CD123 CAR of the invention does not comprise a TM domain from 4-1BB, preferably of sequence IISFFLALTSTALLFLLFFLTLRFSVV (SEQ ID NO. 7) In a more preferred embodiment said Hinge is of SEQ ID NO 171.

[0241] A CAR according to the present invention comprises a hinge region between said extracellular ligand-binding domain and said transmembrane domain. The term “hinge region” used herein generally means any oligo- or polypeptide that functions to link the transmembrane domain to the extracellular ligand-binding domain. In particular, hinge region are used to provide more flexibility and accessibility for the extracellular ligand-binding domain. A hinge region may comprise up to 300 amino acids, preferably 10 to 100 amino acids and most preferably 25 to 50 amino acids. Hinge region may be derived from all or part of naturally occurring molecules, such as from all or part of the extracellular region of CD8, CD4, or from all or part of an antibody constant region.

[0242] In one embodiment, said hinge region comprises at least one epitopes recognized by a monoclonal antibody, as disclosed in table 7.

[0243] In one embodiment, said hinge region comprises at least two sequences of SEQ ID No 161 and preferably is of SEQ ID No 171.

[0244] In one embodiment said CD123 CAR of the invention comprises at least one sequence of SEQ ID No 161 in the scfv.

[0245] In one embodiment said CD123 CAR of the invention comprises two sequences of SEQ ID No 161 and a sequence of SEQ ID NO 169 in the scfv, preferably at the N-terminal end of the scfv.

[0246] Alternatively, the hinge region may be a synthetic sequence that corresponds to a naturally occurring hinge sequence, or may be an entirely synthetic hinge sequence. In a preferred embodiment said hinge domain comprises a part of human CD8 alpha chain, FcγRIIIα receptor or IgG1 respectively referred to in this specification as SEQ ID NO. 3, SEQ ID NO. 4 and SEQ ID NO. 5, or hinge polypeptides which display preferably at least 80%, more preferably at least 90%, 95% 97% or 99% sequence identity with these polypeptides.

[0247] In a more preferred embodiment, said hinge domain comprises a part of human CD8 alpha chain, or of FcγRIIIα receptor, more preferably said hinge domain comprises a sequence of SEQ ID NO. 3 or of SEQ ID NO. 4 or with at least 80%, more preferably at least 90%, 95% 97% or 99% sequence identity with SEQ ID NO. 3 or SEQ ID NO. 4.

[0248] Other Additional Scfv

[0249] Downregulation or mutation of target antigens is commonly observed in cancer cells, creating antigen-loss escape variants. Thus, to offset tumor escape and render immune cell more specific to target, the CD123 specific CAR according to the invention can comprise another extracellular ligand-binding domains, to simultaneously bind different elements in target thereby augmenting immune cell activation and function. In one embodiment, the extracellular ligand-binding domains can be placed in tandem on the same transmembrane polypeptide, and optionally can be separated by a linker. In another embodiment, said different extracellular ligand-binding domains can be placed on different transmembrane polypeptides composing the CAR. In another embodiment, the present invention relates to a population of CARs comprising each one different extracellular ligand binding domains. In a particular, the present invention relates to a method of engineering immune cells comprising providing an immune cell and expressing at the surface of said cell a population of CAR each one comprising different extracellular ligand binding domains. In another particular embodiment, the present invention relates to a method of engineering an immune cell comprising providing an immune cell and introducing into said cell polynucleotides encoding polypeptides composing a population of CAR each one comprising different extracellular ligand binding domains. By population of CARs, it is meant at least two, three, four, five, six or more CARs each one comprising different extracellular ligand binding domains. The different extracellular ligand binding domains according to the present invention can preferably simultaneously bind different elements in target thereby augmenting immune cell activation and function.

[0250] The present invention also relates to an isolated immune cell which comprises a population of CARs each one comprising different extracellular ligand binding domains.

[0251] In a preferred embodiment, a CD123 CAR according to the invention comprises a polypeptide of SEQ ID NO. 31 or a polypeptide of SEQ ID NO. 32, more preferably a CD123 CAR according to the invention comprises a polypeptide with at least 80% identity, preferably 80% to 99% identity with SEQ ID NO. 31 or a polypeptide having 80 to 99% identity with SEQ ID NO. 32. Even more preferably a CAR according to the invention comprises a polypeptide having 85 to 99% identity with a polypeptide of SEQ ID NO. 31 or with SEQ ID NO. 32.

[0252] In a preferred embodiment, a CD123 CAR according to the invention comprises a polypeptide having the following sequences SEQ ID NO. 31.

[0253] In a preferred embodiment, a CD123 CAR according to the invention comprises a polypeptide having the following sequence selected from SEQ ID NO. 32, SEQ ID NO. 31 and SEQ ID NO. 160.

[0254] In one preferred embodiment, a CAR according to the invention comprises at least one polypeptide selected from the following sequences:

(SEQ ID NO. 24)

EVKLVESGGGLVQPGRSLRLSCTASGFTFTDYYMSWVRQAPGKGLEWVGL
IRSKADGYTTEYSASVKGRFTISRDDSKSILYLQMNSLKTEDTAVYYCAR
DAAYYSYYSPEGAMDYWGQGTLVTVSS,

(SEQ ID NO. 25)

EVQLVESGGGLVQPGRSLRLSCTASGFTFTDYYMSWVRQAPGKGLEWVGL
IRSKADGYTTEYSASVKGRFTISRDDSKSILYLQMNSLKTEDTAVYYCAR
DAAYYSYYSPEGAMDYWGQGTLVTVSS,

(SEQ ID NO. 26)

EVQLVESGGGLVQPGRSLRLSCTASGFTFTDYYMSWVRQAPGKGLEWVGL
IRSKADGYTTEYSASVKGRFTISRDDSKSIAYLQMNSLKTEDTAVYYCAR
DAAYYSYYSPEGAMDYWGQGTLVTVSS,

(SEQ ID NO. 27)

EVQLVESGGGLVQPGRSLRLSCTASGFTFTDYYMSWVRQAPGKGLEWVGF
IRSKADGYTTEYSASVKGRFTISRDDSKSIAYLQMNSLKTEDTAVYYCAR
DAAYYSYYSPEGAMDYWGQGTLVTVSS,

(SEQ ID NO. 28)

EVQLVESGGGLVQPGRSLRLSCTASGFTFTDYYMSWVRQAPGKGLEWVGF
IRSKADGYTTEYAASVKGRFTISRDDSKSIAYLQMNSLKTEDTAVYYCAR
DAAYYSYYSPEGAMDYWGQGTLVTVSS,

(SEQ ID NO. 29)

EVQLVESGGGLVQPGRSLRLSCTASGFTFTDYYMSWVRQAPGKGLEWVGL
IRSKADGYTTEYAASVKGRFTISRDDSKSIAYLQMNSLKTEDTAVYYCAR
DAAYYSYYSPEGAMDYWGQGTLVTVSS
and

(SEQ ID NO. 30)

EVQLVESGGGLVQPGRSLRLSCTASGFTFTDYYMSWVRQAPGKGLEWVGF
IRSKADGYTTEYAASVKGRFTISRDDSKSIAYLQMNSLKTEDTAVYYCTR
DAAYYSYYSPEGAMDYWGQGTLVTVSS

and at least one sequence selected from the following sequences

(SEQ ID NO. 18)

MADYKDIVMTQSPSSVSASVGDRVTITCRASQNVDSAVAWYQQKPGKAPK
ALIYSASYRYSGVPSRFSGRGSGTDFTLTISSLQPEDFATYYCQQYYSTP
WTFGQGTKVEIKR,

(SEQ ID NO. 19)

MADYKDIQMTQSPSSVSASVGDRVTITCRASQNVDSAVAWYQQKPGKAPK
ALIYSASYRYSGVPSRFSGRGSGTDFTLTISSLQPEDFATYYCQQYYSTP
WTFGQGTKVEIKR,

(SEQ ID NO. 20)

MADYKDIQMTQSPSSVSASVGDRVTITCRASQNVDSAVAWYQQKPGKAPK
ALIYSASYRYSGVPSRFSGSGSGTDFTLTISSLQPEDFATYYCQQYYSTP
WTFGQGTKVEIKR,

(SEQ ID NO. 21)

MADYKDIQMTQSPSSVSASVGDRVTITCRASQNVDSAVAWYQQKPGKAPK
LLIYSASYRYSGVPSRFSGSGSGTDFTLTISSLQPEDFATYYCQQYYSTP
WTFGQGTKVEIKR,

(SEQ ID NO. 22)

MADYKDIQMTQSPSSVSASVGDRVTITCRASQNVDSAVAWYQQKPGKAPK
LLIYSASYRQSGVPSRFSGSGSGTDFTLTISSLQPEDFATYYCQQYYSTP
WTFGQGTKVEIKR
and

(SEQ ID NO. 23)

MADYKDIQMTQSPSSVSASVGDRVTITCRASQNVDSAVAWYQQKPGKAPK
LLIYSASYGQSGVPSRFSGSGSGTDFTLTISSLQPEDFATYYCQQYYSTP
WTFGQGTKVEIKR.

[0255] In one embodiment, a CD123 CAR according to the invention comprises one polypeptide selected from the following sequences: SEQ ID NO. 24, SEQ ID NO. 25, SEQ ID NO. 26, SEQ ID NO. 27, SEQ ID NO. 28, SEQ ID NO. 29, and SEQ ID NO. 30 and a peptide selected from the following sequences: SEQ ID NO. 18, SEQ ID NO. 19, SEQ ID NO. 20, SEQ ID NO. 21, SEQ ID NO. 22, and SEQ ID NO. 23.

[0256] In one embodiment, a CD123 CAR according to the invention comprises a polypeptide having at least 80%, 81%, 82%, 83%, 84%, 85%, 86%, 87%, 88%, 89%, 90%, 91%, 92%, 93%, 94%, 95%, 96%, 97%, 98%, or 99% identity with a polypeptide of SEQ ID NO. 11, or having at least 80%, 81%, 82%, 83%, 84%, 85%, 86%, 87%, 88%, 89%, 90%, 91%, 92%, 93%, 94%, 95%, 96%, 97%, 98%, or 99% identity with a polypeptide of SEQ ID NO. 12.

[0257] In a more preferred embodiment, a CD123 CAR according to the invention comprises a polypeptide comprising 80%, 81%, 82%, 83%, 84%, 85%, 86%, 87%, 88%, 89%, 90%, 91%, 92%, 93%, 94%, 95%, 96%, 97%, 98%, or 99% identity with SEQ ID NO. 11+SEQ ID NO. 10+SEQ ID NO. 12.

[0258] According to the invention, the immune cells expressing the anti-CD123 CAR of the invention trigger an anti-cancer immune response, no or reduce GVHD and proliferate even in the presence of purine analogue of FLAG treatment.

[0259] In a preferred embodiment, the immune cells expressing the CAR of the invention endowed with the anti-CD123 CAR of the invention does trigger an immune response which does not comprise a human anti-mouse antibody (HAMA) response.

[0260] According to the invention, an efficient amount of the engineered immune cell of the invention can be administered to a patient in need thereof at least once, alone or in combination with another treatment.

[0261] Polynucleotides, Vectors

[0262] The present invention also relates to polynucleotides, vectors encoding the above described CAR according to the invention.

[0263] The polynucleotide may consist in an expression cassette or expression vector (e.g. a plasmid for introduction into a bacterial host cell, or a viral vector such as a baculovirus vector for transfection of an insect host cell, or a plasmid or viral vector such as a lentivirus for transfection of a mammalian host cell).

[0264] In a particular embodiment, the different nucleic acid sequences can be included in one polynucleotide or vector which comprises a nucleic acid sequence encoding ribosomal skip sequence such as a sequence encoding a 2A peptide. 2A peptides, which were identified in the Aphthovirus subgroup of picornaviruses, causes a ribosomal “skip” from one codon to the next without the formation of a peptide bond between the two amino acids encoded by the codons (see (Donnelly and Elliott 2001; Atkins, Wills et al. 2007; Doronina, Wu et al. 2008)). By “codon” is meant three nucleotides on an mRNA (or on the sense strand of a DNA molecule) that are translated by a ribosome into one amino acid residue. Thus, two polypeptides can be synthesized from a single, contiguous open reading frame within an mRNA when the polypeptides are separated by a 2A oligopeptide sequence that is in frame. Such ribosomal skip mechanisms are well known in the art and are known to be used by several vectors for the expression of several proteins encoded by a single messenger RNA.

[0265] To direct transmembrane polypeptide into the secretory pathway of a host cell, a secretory signal sequence (also known as a leader sequence, prepro sequence or pre sequence) is provided in polynucleotide sequence or vector sequence. The secretory signal sequence is operably linked to the transmembrane nucleic acid sequence, i.e., the two sequences are joined in the correct reading frame and positioned to direct the newly synthesized polypeptide into the secretory pathway of the host cell. Secretory signal sequences are commonly positioned 5′ to the nucleic acid sequence encoding the polypeptide of interest, although certain secretory signal sequences may be positioned elsewhere in the nucleic acid sequence of interest (see, e.g., Welch et al., U.S. Pat. No. 5,037,743; Holland et al., U.S. Pat. No. 5,143,830). In a preferred embodiment the signal peptide comprises the amino acid sequence SEQ ID NO: 1 and 2 or at least 90%, 95% 97% or 99% sequence identity with SEQ ID NO: 1 or 2, preferably SEQ ID NO: 1.

[0266] Those skilled in the art will recognize that, in view of the degeneracy of the genetic code, considerable sequence variation is possible among these polynucleotide molecules. Preferably, the nucleic acid sequences of the present invention are codon-optimized for expression in mammalian cells, preferably for expression in human cells. Codon-optimization refers to the exchange in a sequence of interest of codons that are generally rare in highly expressed genes of a given species by codons that are generally frequent in highly expressed genes of such species, such codons encoding the amino acids as the codons that are being exchanged.

[0267] In one embodiment, the different nucleic acid sequences encoding a CD123 CAR of the invention can be included in one polynucleotide or vector.

[0268] In a more preferred embodiment the claimed invention is directed to a vector allowing a stable expression of the CAR of the invention. Stable means here that the CAR of the invention is detected at the cell surface of engineered cells at least 1 year after injection.

[0269] In another embodiment the claimed invention is directed to a vector, allowing a stable expression of a CD123 CAR of the invention, preferably of SEQ ID NO. 31, SEQ ID NO 32 or SEQ ID NO 160.

[0270] In a preferred embodiment, the present invention provides a pCLS27333 vector comprising a sequence encoding any one of the CD123 CAR of the invention preferably a CD123 CAR of SEQ ID NO 31, SEQ ID NO 32 or SEQ ID NO. 160.

[0271] Cells

[0272] Cell according to the present invention refers to a cell of hematopoietic origin functionally involved in the initiation and/or execution of innate and/or adaptative immune response. Cell according to the present invention is preferably a T-cell obtained from a donor. Said T cell according to the present invention can be derived from a stem cell. The stem cells can be adult stem cells, embryonic stem cells, more particularly non-human stem cells, cord blood stem cells, progenitor cells, bone marrow stem cells, totipotent stem cells or hematopoietic stem cells. In a preferred embodiment, cells are human cells, in particular human stem cells. In a more preferred embodiment, cells are human T cells, in particular human engineered T cells.

[0273] Representative human stem cells are CD34+ cells. Said isolated cell can also be a dendritic cell, killer dendritic cell, a mast cell, a NK-cell, a B-cell or a T-cell selected from the group consisting of inflammatory T-lymphocytes, cytotoxic T-lymphocytes, regulatory T-lymphocytes or helper T-lymphocytes. In another embodiment, said cell can be derived from the group consisting of CD4+T-lymphocytes and CD8+T-lymphocytes. In a preferred embodiment, said cell can be derived from the group consisting of engineered CD4+T-lymphocytes and engineered CD8+T-lymphocytes.

[0274] Prior to expansion and genetic modification of the cells of the invention, a source of cells can be obtained from a subject through a variety of non-limiting methods. Cells can be obtained from a number of non-limiting sources, including peripheral blood mononuclear cells, bone marrow, lymph node tissue, cord blood, thymus tissue, tissue from a site of infection, ascites, pleural effusion, spleen tissue, and tumors. In certain embodiments of the present invention, any number of T-cell lines available and known to those skilled in the art, may be used. In another embodiment, said cell is preferably derived from a healthy donor. In another embodiment, said cell is part of a mixed population of cells which present different phenotypic characteristics.

[0275] Preferably, isolation and preparation of stem cells does not require the destruction of at least one human embryo. The immune cells can originate from the patient, in view of operating autologous treatments, or from one or several donors in view of producing allogeneic cells, which can be used in allogeneic treatments.

[0276] More preferably the engineered immune cell of the invention express an anti-CD123 CAR corresponding to SEQ ID NO 31, SEQ ID NO 32, or SEQ ID NO 33 at the cell surface, even more preferably the engineered immune cell of the invention express an humanized anti-CD123 CAR corresponding to humanized SEQ ID NO 31, SEQ ID NO 32, or SEQ ID NO 32.

[0277] In one embodiment the engineered immune cell of the invention express an anti-CD123 CAR corresponding to SEQ ID NO. 34 to SEQ ID NO. 159, preferably SEQ ID NO. 34 to SEQ ID NO. 117, more preferably SEQ ID NO. 76 to SEQ ID NO. 117.

[0278] Among these anti-CD123 CARs, those comprising

### VH1/VL1, VH1/VL3; VH1/VL4;

### VH2/VL2, VH2/VL3, VH2/VL4;

### VH3/VL1, VH3/VL2, VH3/VL3, VH3/VL4

### VH4/VL1, VH4/VL2, VH4/VL3, VH4/VL4

[0279] are preferred;

### VH1/VL1, VH1/VL3;

### VH2/VL4;

### VH3/VL1, VH3/VL2, VH3/VL3,

[0280] VH4/VL1, VH4/VL2, VH4/VL3, VH4/VL4 are more preferred,
and those comprising VH3/VL2, VH4/VL1, VH4/VL2, VH4/VL3, VH4/VL4 are even more preferred.

[0281] The most preferred are those having a humanized Klone 43 (huK43) and

### VH10a/VL1a

### VH9a/VL6a

### VH10a/VL3a

### VH9a/VL8a

### VH2a/VL3a

### VH10a/VL9a

### VH9a/VL3a

### VH2a/VL1a

[0282] In one embodiment the engineered immune cell of the invention express an anti-CD123 CAR corresponding to SEQ ID NO. 160 and SEQ ID NO. 172 to SEQ ID NO. 187

Methods of Engineering Immune Cells Endowed with CARs:

[0283] The present invention encompasses the method of preparing immune cells for immunotherapy comprising introducing ex-vivo into said immune cells the polynucleotides or vectors encoding the CD123 CAR previously described in WO2014/130635 WO2013176916, WO2013176915 and incorporated herein by reference.

[0284] In a preferred embodiment, said polynucleotides are included in lentiviral vectors in view of being stably expressed in the immune cells.

[0285] In a more preferred embodiment, said polynucleotide is included in a lentiviral vector in view of being stably expressed in the immune cells.

[0286] According to further embodiments, said method further comprises the step of genetically modifying said cell to make them more suitable for allogeneic transplantation and to reduce GVHD response.

### Modifying T-Cell by Inactivating at Least One Gene Encoding a T-Cell Receptor (TCR) Component.

[0287] According to a first aspect, the immune cell can be made less allogeneic, for instance, by inactivating at least one gene expressing one or more component of T-cell receptor (TCR) as described in WO 2013/176915, which can be combined with the inactivation of a gene encoding or regulating HLA or β2m protein expression. Accordingly the risk of graft versus host syndrome and graft rejection is significantly reduced.

[0288] Accordingly, when the immune cells are T-cells, the present invention also provides methods to engineer T-cells that are less allogeneic.

[0289] Methods of making cells less allogenic can comprise the step of inactivating at least one gene encoding a T-Cell Receptor (TCR) component, in particular TCRalpha, TCRbeta genes.

[0290] Methods disclosed in WO2013/176915 to prepare CAR expressing immune cell suitable for allogeneic transplantation, by inactivating one or more component of T-cell receptor (TCR), are all incorporated herein by reference.

[0291] The present invention encompasses an anti-CD123 CAR expressing immune cell wherein at least one gene expressing one or more component of T-cell receptor (TCR) has been inactivated. Thus, the present invention provides an anti-CD123 CAR expressing T cell wherein the CAR is derived from Klon 43, in particular having at least 80% identity with SEQ ID No 31 and wherein at least one gene expressing one or more component of T-cell receptor (TCR) is inactivated.

[0292] The present invention encompasses an anti-CD123 CAR expressing immune cell wherein at least one gene expressing one or more component of T-cell receptor (TCR) has been inactivated. Thus, the present invention provides an anti-CD123 CAR expressing T cell wherein the CAR is derived from Klon 43, in particular having at least 80% identity with SEQ ID No 32 and wherein at least one gene expressing one or more component of T-cell receptor (TCR) is inactivated.

[0293] The present invention encompasses an anti-CD123 CAR expressing immune cell wherein at least one gene expressing one or more component of T-cell receptor (TCR) has been inactivated. Thus, the present invention provides an anti-CD123 CAR expressing T cell wherein the CAR is derived from Klon 43, in particular having at least 80% identity with SEQ ID No 160 and wherein at least one gene expressing one or more component of T-cell receptor (TCR) is inactivated.

[0294] According to the invention, anti-CD123 CAR immune cells with one or more component of T-cell receptor (TCR) inactivated, are intended to be used as a medicament.

[0295] By inactivating a TCR gene it is intended that the gene of interest is not expressed in a functional protein form. In particular embodiments, the genetic modification of the method relies on the expression, in provided cells to engineer, of one rare-cutting endonuclease such that said rare-cutting endonuclease specifically catalyzes cleavage in one targeted gene thereby inactivating said targeted gene. The nucleic acid strand breaks caused by the rare-cutting endonuclease are commonly repaired through the distinct mechanisms of homologous recombination or non-homologous end joining (NHEJ). However, NHEJ is an imperfect repair process that often results in changes to the DNA sequence at the site of the cleavage. Mechanisms involve rejoining of what remains of the two DNA ends through direct re-ligation (Critchlow and Jackson 1998) or via the so-called microhomology-mediated end joining (Betts, Brenchley et al. 2003; Ma, Kim et al. 2003). Repair via non-homologous end joining (NHEJ) often results in small insertions or deletions and can be used for the creation of specific gene knockouts. Said modification may be a substitution, deletion, or addition of at least one nucleotide. Cells in which a cleavage-induced mutagenesis event, i.e. a mutagenesis event consecutive to an NHEJ event, has occurred can be identified and/or selected by well-known method in the art. In a particular embodiment, the step of inactivating at least a gene encoding a component of the T-cell receptor (TCR) into the cells of each individual sample comprises introducing into the cell a rare-cutting endonuclease able to disrupt at least one gene encoding a component of the T-cell receptor (TCR). In a more particular embodiment, said cells of each individual sample are transformed with nucleic acid encoding a rare-cutting endonuclease capable of disrupting at least one gene encoding a component of the T-cell receptor (TCR), and said rare-cutting endonuclease is expressed into said cells.

[0296] Said rare-cutting endonuclease can be a meganuclease, a Zinc finger nuclease, CRISPR/Cas9 nuclease, Argonaute nuclease, a TALE-nuclease or a MBBBD-nuclease. In a preferred embodiment, said rare-cutting endonuclease is a TALE-nuclease. By TALE-nuclease is intended a fusion protein consisting of a DNA-binding domain derived from a Transcription Activator Like Effector (TALE) and one nuclease catalytic domain to cleave a nucleic acid target sequence (Boch, Scholze et al. 2009; Moscou and Bogdanove 2009; Christian, Cermak et al. 2010; Cermak, Doyle et al. 2011; Geissler, Scholze et al. 2011; Huang, Xiao et al. 2011; Li, Huang et al. 2011; Mahfouz, Li et al. 2011; Miller, Tan et al. 2011; Morbitzer, Romer et al. 2011; Mussolino, Morbitzer et al. 2011; Sander, Cade et al. 2011; Tesson, Usal et al. 2011; Weber, Gruetzner et al. 2011; Zhang, Cong et al. 2011; Deng, Yan et al. 2012; Li, Piatek et al. 2012; Mahfouz, Li et al. 2012; Mak, Bradley et al. 2012). In the present invention new TALE-nucleases have been designed for precisely targeting relevant genes for adoptive immunotherapy strategies.

[0297] Preferred TALE-nucleases recognizing and cleaving the target sequence are described in PCT/EP2014/075317. In particular, additional catalytic domain can be further introduced into the cell with said rare-cutting endonuclease to increase mutagenesis in order to enhance their capacity to inactivate targeted genes. More particularly, said additional catalytic domain is a DNA end processing enzyme. Non limiting examples of DNA end-processing enzymes include 5-3′ exonucleases, 3-5′ exonucleases, 5-3′ alkaline exonucleases, 5′ flap endonucleases, helicases, phosphatase, hydrolases and template-independent DNA polymerases. Non limiting examples of such catalytic domain comprise of a protein domain or catalytically active derivate of the protein domain selected from the group consisting of hExol (EXO1_HUMAN), Yeast Exol (EXO1_YEAST), E. coli Exol, Human TREX2, Mouse TREX1, Human TREX1, Bovine TREX1, Rat TREX1, TdT (terminal deoxynucleotidyl transferase) Human DNA2, Yeast DNA2 (DNA2_YEAST). In a preferred embodiment, said additional catalytic domain has a 3′-5′-exonuclease activity, and in a more preferred embodiment, said additional catalytic domain is TREX, more preferably TREX2 catalytic domain (WO2012/058458). In another preferred embodiment, said catalytic domain is encoded by a single chain TREX2 polypeptide. Said additional catalytic domain may be fused to a nuclease fusion protein or chimeric protein according to the invention optionally by a peptide linker.

[0298] Endonucleolytic breaks are known to stimulate the rate of homologous recombination. Thus, in another embodiment, the genetic modification step of the method further comprises a step of introduction into cells of an exogeneous nucleic acid comprising at least a sequence homologous to a portion of the target nucleic acid sequence, such that homologous recombination occurs between the target nucleic acid sequence and the exogeneous nucleic acid. In particular embodiments, said exogenous nucleic acid comprises first and second portions which are homologous to region 5′ and 3′ of the target nucleic acid sequence, respectively. Said exogenous nucleic acid in these embodiments also comprises a third portion positioned between the first and the second portion which comprises no homology with the regions 5′ and 3′ of the target nucleic acid sequence. Following cleavage of the target nucleic acid sequence, a homologous recombination event is stimulated between the target nucleic acid sequence and the exogenous nucleic acid. Preferably, homologous sequences of at least 50 bp, preferably more than 100 bp and more preferably more than 200 bp are used within said donor matrix. In a particular embodiment, the homologous sequence can be from 200 bp to 6000 bp, more preferably from 1000 bp to 2000 bp. Indeed, shared nucleic acid homologies are located in regions flanking upstream and downstream the site of the break and the nucleic acid sequence to be introduced should be located between the two arms.

### Drug Resistant T-Cells

[0299] The inventor sought to engineer TCR KO T-cell for immunotherapy, in particular to engineer TCR KO anti-CD123 CAR of SEQ ID NO 31, of SEQ ID NO 32, or of SEQ ID NO 160 expressing immune cell that can be used in combination with a therapeutic agent (anti-cancer drug).

[0300] As used herein, a cell which is “resistant or tolerant” to an agent means a cell which has been genetically modified so that the cell proliferates and is active in the presence of an amount of an agent that inhibits or prevents proliferation of a cell without the genetic modification.

[0301] By inactivating a gene it is intended that the gene of interest is not expressed in a functional protein form. In particular embodiment, the genetic modification of the method relies on the expression, in provided cells to engineer, of one rare-cutting endonuclease such that said rare-cutting endonuclease specifically catalyzes cleavage in one targeted gene thereby inactivating said targeted gene. In a particular embodiment, the step of inactivating at least one drug sensitizing gene comprises introducing into the cell a rare-cutting endonuclease able to disrupt at least one drug sensitizing gene. In a more particular embodiment, said cells are transformed with nucleic acid encoding a rare-cutting endonuclease capable of disrupting a drug sensitizing gene, and said rare-cutting endonuclease is expressed into said cells. Said rare-cutting endonuclease can be a meganuclease, a Zinc finger nuclease, CRISPR/Cas9 nuclease, A MBBBD-nuclease or a TALE-nuclease. In a preferred embodiment, said rare-cutting endonuclease is a TALE-nuclease.

[0302] In a preferred embodiment, a drug sensitizing gene which can be inactivated to confer drug resistance to the T-cell is the human deoxycytidine kinase (dCK) gene. This enzyme is required for the phosphorylation of the deoxyribonucleosides deoxycytidine (dC), deoxyguanosine (dG) and deoxyadenosine (dA). Purine nucleotide analogs (PNAs) are metabolized by dCK into mono-, di- and tri-phosphate PNA. Their triphosphate forms and particularly clofarabine triphosphate compete with ATP for DNA synthesis, acts as proapoptotic agent and are potent inhibitors of ribonucleotide reductase (RNR) which is involved in trinucleotide production.

[0303] Preferably, the inactivation of dCK in T cells is mediated by TALE nuclease. To achieve this goal, several pairs of dCK TALE-nuclease have been designed, assembled at the polynucleotide level and validated by sequencing. Examples of TALE-nuclease pairs which can be used according to the invention are depicted in PCT/EP2014/075317.

[0304] This dCK inactivation in T cells confers resistance to purine nucleoside analogs (PNAs) such as clofarabine and fludarabine.

[0305] In a more preferred embodiment, the dCK inactivation in T cells is combined with an inactivation of TRAC genes rendering these double knock out (KO) T cells both resistant to drug such as clofarabine and less allogeneic than the same cell with an intact TCR. This double features is particularly useful for a therapeutic goal, allowing “off-the-shelf” allogeneic cells for immunotherapy in conjunction with chemotherapy to treat patients with cancer preferably refractory relapsed AML, or BPDNL.

[0306] This double KO inactivation dCK/TRAC can be performed simultaneously or sequentially before or after CD123 CAR of SEQ ID NO 31, of SEQ ID NO 32, or of SEQ ID NO 160 expression. One example of TALE-nuclease dCK/TRAC pairs which gave success in the invention is described in PCT/EP2014/075317, in particular, the target sequences in the 2 loci (dCK and TRAC).

[0307] According to another aspect, the CD123 CAR expressing T-cell of the invention (TCR KO anti-CD123 CAR of SEQ ID NO 31, of SEQ ID NO 32, or of SEQ ID NO 160-expressing immune cells) can be further genetically engineered to improve its resistance to immunosuppressive drugs or chemotherapy treatments, which are used as standard care for treating cancer.

[0308] Several cytotoxic agents (anti-cancer drugs) such as anti-metabolites, alkylating agents, anthracyclines, DNA methyltransferase inhibitors, platinum compounds and spindle poisons have been developed to kill cancer cells. However, the introduction of these agents with novel therapies, such as immunotherapies, is problematic as these drugs affect the functioning/survival of immune T cells. For example, chemotherapy agents can be detrimental to the establishment of robust anti-tumor immunocompetent cells due to the agents' non-specific toxicity profiles. Small molecule-based therapies targeting cell proliferation pathways may also hamper the establishment of anti-tumor immunity. If chemotherapy regimens that are transiently effective can be combined with novel immunocompetent cell therapies then significant improvement in anti-neoplastic therapy might be achieved (for review (Dasgupta, McCarty et al. 2011).

[0309] To improve cancer therapy and selective engraftment of allogeneic TCR KO, CD123 CAR of SEQ ID NO 31, SEQ ID NO 32 or SEQ ID NO 160 expressing T-cells, drug resistance is conferred to said allogeneic T cells to protect them from the toxic side effects of chemotherapy agent. The drug resistance of T-cells also permits their enrichment in or ex vivo, as T-cells which express the drug resistance gene will survive and multiply relative to drug sensitive cells.

[0310] Methods for engineering T-cells resistant to chemotherapeutic agents are disclosed in PCT/EP2014/075317 which is fully incorporated by reference herein.

[0311] In particular, the present invention discloses a method of engineering allogeneic TCR KO, CD123 CAR of SEQ ID NO 31, SEQ ID NO 32 or SEQ ID NO 160 expressing T-cells, suitable for immunotherapy wherein at least one gene encoding a T-cell receptor (TCR) component is inactivated and at least one gene is modified to confer drug resistance, preferably the dCK gene is inactivated.

[0312] A method of engineering allogeneic CD123 CAR of SEQ ID NO 31, SEQ ID NO 32 or SEQ ID NO 160 expressing T-cells suitable for combination therapy with purine analogues comprising:
[0313] Providing an anti-CD123 CAR of SEQ ID NO 31, SEQ ID NO 32, SEQ ID NO 160 expressing T cell,
[0314] Modifying said anti-CD123 CAR expressing T-cell by inactivating at least one gene encoding a T-cell receptor (TCR) component;
[0315] Modifying said anti-CD123 CAR expressing T-cell to confer drug resistance to said anti-CD123 CAR expressing T-cell; preferably to confer resistance to purine analogues
[0316] Expanding said engineered anti-CD123 CAR expressing T-cell in the presence of said drug said drug is a purine analogue selected from pentostatin, fludarabine 2-deoxyadenosine, cladribine, clofarabine, Nelarabine, preferably pentostatin, fludarabine monophosphate, and 2-chlorodeoxyadenosine (2-CDA).

[0317] Alternatively, the present invention relates to a method comprising:
[0318] Providing an anti-CD123 CAR of SEQ ID NO 31, of SEQ ID NO 32, or of SEQ ID NO 160 expressing T cell,
[0319] Modifying said anti-CD123 CAR of SEQ ID NO 31, of SEQ ID NO 32, or of SEQ ID NO 160 expressing T-cell to confer drug resistance to said anti-CD123 CAR of SEQ ID NO 31, of SEQ ID NO 32, or of SEQ ID NO 160 expressing T-cell; by deleting the dck gene, preferably said drug is a purine analogue
[0320] Modifying said anti-CD123 CAR of SEQ ID NO 31, of SEQ ID NO 32, or of SEQ ID NO 160 expressing T-cell by inactivating at least one gene encoding a T-cell receptor (TCR) component;
[0321] Expanding said engineered anti-CD123 CAR of SEQ ID NO 31, of SEQ ID NO 32, or of SEQ ID NO 160 expressing T-cell in the presence of said drug, said drug is a purine analogue selected from pentostatin, fludarabine 2-deoxyadenosine, cladribine, clofarabine, Nelarabine, preferably pentostatin, fludarabine monophosphate, and 2-chlorodeoxyadenosine (2-CDA).

[0322] In particular, the present invention relates to a method of engineering allogeneic cells suitable for immunotherapy wherein a gene encoding a T-cell receptor (TCR alpha) component is inactivated and the dCK gene is modified to confer resistance to purine analogues comprising:
[0323] Providing an anti-CD123 CAR expressing T-cell; in particular an anti-CD123 CAR of SEQ ID NO 31, of SEQ ID NO 32, or of SEQ ID NO 160 expressing T cell,
[0324] Modifying said anti-CD123 CAR of SEQ ID NO 31, of SEQ ID NO 32, or of SEQ ID NO 160 expressing T-cell by inactivating the gene encoding the T-cell receptor (TCR alpha) component;
[0325] Inactivating the dCK gene in said anti-CD123 CAR of SEQ ID NO 31, of SEQ ID NO 32, or of SEQ ID NO 160 expressing T-cell to confer resistance to purine analogues;
[0326] Expanding said engineered anti-CD123 CAR of SEQ ID NO 31, of SEQ ID NO 32, or of SEQ ID NO 160 expressing T-cell in the presence of said drug.

[0327] Alternatively, the present invention relates to a method comprising:
[0328] Providing an anti-CD123 CAR expressing T-cell; in particular an anti-CD123 CAR of SEQ ID NO 31, of SEQ ID NO 32, or of SEQ ID NO 160 expressing T cell,
[0329] Inactivating the dCK gene in said anti-CD123 CAR of SEQ ID NO 31, of SEQ ID NO 32, or of SEQ ID NO 160 expressing T-cell to confer resistance purine analogues
[0330] Modifying said anti-CD123 CAR of SEQ ID NO 31, of SEQ ID NO 32, or of SEQ ID NO 160 CAR expressing T-cell by inactivating at least one gene encoding a T-cell receptor (TCR alpha) component;
[0331] Expanding said engineered anti-CD123 CAR expressing T-cell in the presence of purine analogues.

[0332] In a preferred embodiment dCK KO, TCR KO CD123 CAR of SEQ ID NO 31, of SEQ ID NO 32, or of SEQ ID NO 160 CAR expressing T-cells provided are resistant to a drug selected from pentostatin, fludarabine 2-deoxyadenosine, cladribine, clofarabine, or Nelarabine, preferably to fludarabine monophosphate, or to 2-chlorodeoxyadenosine (2-CDA).

### Gene Expression Conferring Drug Resistance to Anti-CD123 CAR-Expressing Immune Cells

[0333] In a particular embodiment, said drug resistance can be conferred to the T-cell of the invention by the expression of at least one drug resistance gene. Said drug resistance gene refers to a nucleic acid sequence that encodes “resistance” to an agent, such as a chemotherapeutic agent (e.g. methotrexate). In other words, the expression of the drug resistance gene in a cell permits proliferation of the cells in the presence of the agent to a greater extent than the proliferation of a corresponding cell without the drug resistance gene or survival in the presence of said drug. The expression of the drug resistance gene in a cell permits proliferation of the cells in the presence of the agent and does not affect its activity. A drug resistance gene of the invention can encode resistance to anti-metabolite, methotrexate, vinblastine, cisplatin, alkylating agents, anthracyclines, cytotoxic antibiotics, anti-immunophilins, their analogs or derivatives.

[0334] In one embodiment, a drug resistance gene confers resistance to a drug (or an agent), in particular an anti-cancer drug selected from Aracytine, Cytosine Arabinoside, amsacrine, Daunorubicine, Idarubicine, Novantrone, Mitoxantrone, Vepeside, Etoposide (VP16), arsenic trioxyde, transretinoic acid, combination of arsenic trioxyde, transretinoic acid, mechlorethamine, procarbazine, chlorambucil, cytarabine, anthracyclines, 6-thioguanine, hydroxyurea, prednisone, and combination thereof.

[0335] Several drug resistance genes have been identified that can potentially be used to confer drug resistance the CD123 CAR expressing T cells of the invention (Takebe, Zhao et al. 2001; Sugimoto, Tsukahara et al. 2003; Zielske, Reese et al. 2003; Nivens, Felder et al. 2004; Bardenheuer, Lehmberg et al. 2005; Kushman, Kabler et al. 2007).

[0336] One example of drug resistance gene can also be a mutant or modified form of Dihydrofolate reductase (DHFR) encoding gene. DHFR is an enzyme involved in regulating the amount of tetrahydrofolate in the cell and is essential to DNA synthesis. Folate analogs such as methotrexate (MTX) inhibit DHFR and are thus used as anti-neoplastic agents in clinic. Different mutant forms of DHFR which have increased resistance to inhibition by anti-folates used in therapy have been described. In a particular embodiment, the drug resistance gene according to the present invention can be a nucleic acid sequence encoding a mutant form of human wild type DHFR (GenBank: AAH71996.1) which comprises at least one mutation conferring resistance to an anti-folate treatment, such as methotrexate. In particular embodiment, mutant form of DHFR comprises at least one mutated amino acid at position G15, L22, F31 or F34, preferably at positions L22 or F31 (Schweitzer, Dicker et al. 1990); International application WO94/24277; U.S. Pat. No. 6,642,043). In a particular embodiment, said DHFR mutant form comprises two mutated amino acids at position L22 and F31. Correspondence of amino acid positions described herein is frequently expressed in terms of the positions of the amino acids of the form of wild-type DHFR polypeptide set forth in GenBank: AAH71996.1. In a particular embodiment, the serine residue at position 15 is preferably replaced with a tryptophan residue. In another particular embodiment, the leucine residue at position 22 is preferably replaced with an amino acid which will disrupt binding of the mutant DHFR to antifolates, preferably with uncharged amino acid residues such as phenylalanine or tyrosine. In another particular embodiment, the phenylalanine residue at positions 31 or 34 is preferably replaced with a small hydrophilic amino acid such as alanine, serine or glycine.

[0337] As used herein, “antifolate agent” or “folate analogs” refers to a molecule directed to interfere with the folate metabolic pathway at some level. Examples of antifolate agents include, e.g., methotrexate (MTX); aminopterin; trimetrexate (Neutrexin™); edatrexate; N10-propargyl-5,8-dideazafolic acid (CB3717); ZD1694 (Tumodex), 5,8-dideazaisofolic acid (IAHQ); 5,10-dideazatetrahydrofolic acid (DDATHF); 5-deazafolic acid; PT523 (N alpha-(4-amino-4-deoxypteroyl)-N delta-hemiphthaloyl-L-ornithine); 10-ethyl-10-deazaaminopterin (DDATHF, lomatrexol); piritrexim; 10-EDAM; ZD1694; GW1843; Pemetrexate and PDX (10-propargyl-10-deazaaminopterin).

[0338] Another example of drug resistance gene can also be a mutant or modified form of ionisine-5′-monophosphate dehydrogenase II (IMPDH2), a rate-limiting enzyme in the de novo synthesis of guanosine nucleotides. The mutant or modified form of IMPDH2 is an IMPDH inhibitor resistance gene. IMPDH inhibitors can be mycophenolic acid (MPA) or its prodrug mycophenolate mofetil (MMF). The mutant IMPDH2 can comprises at least one, preferably two mutations in the MAP binding site of the wild type human IMPDH2 (NP_000875.2) that lead to a significantly increased resistance to IMPDH inhibitor. The mutations are preferably at positions T333 and/or S351 (Yam, Jensen et al. 2006; Sangiolo, Lesnikova et al. 2007; Jonnalagadda, Brown et al. 2013). In a particular embodiment, the threonine residue at position 333 is replaced with an isoleucine residue and the serine residue at position 351 is replaced with a tyrosine residue. Correspondence of amino acid positions described herein is frequently expressed in terms of the positions of the amino acids of the form of wild-type human IMPDH2 polypeptide set forth in NP_000875.2.

[0339] Another drug resistance gene is the mutant form of calcineurin. Calcineurin (PP2B), an ubiquitously expressed serine/threonine protein phosphatase that is involved in many biological processes and which is central to T-cell activation. Calcineurin is a heterodimer composed of a catalytic subunit (CnA; three isoforms) and a regulatory subunit (CnB; two isoforms). After engagement of the T-cell receptor, calcineurin dephosphorylates the transcription factor NFAT, allowing it to translocate to the nucleus and active key target gene such as IL2. FK506 in complex with FKBP12, or cyclosporine A (CsA) in complex with CyPA block NFAT access to calcineurin's active site, preventing its dephosphorylation and thereby inhibiting T-cell activation (Brewin, Mancao et al. 2009). The drug resistance gene of the present invention can be a nucleic acid sequence encoding a mutant form of calcineurin resistant to calcineurin inhibitor such as FK506 and/or CsA. In a particular embodiment, said mutant form can comprise at least one mutated amino acid of the wild type calcineurin heterodimer a at positions: V314, Y341, M347, T351, W352, L354, K360, preferably double mutations at positions T351 and L354 or V314 and Y341. In a particular embodiment, the valine residue at position 341 can be replaced with a lysine or an arginine residue, the tyrosine residue at position 341 can be replaced with a phenylalanine residue; the methionine at position 347 can be replaced with the glutamic acid, arginine or tryptophane residue; the threonine at position 351 can be replaced with the glutamic acid residue; the tryptophane residue at position 352 can be replaced with a cysteine, glutamic acid or alanine residue, the serine at position 353 can be replaced with the histidine or asparagines residue, the leucine at position 354 can be replaced with an alanine residue; the lysine at position 360 can be replaced with an alanine or phenylalanine residue of a sequence corresponding to GenBank: ACX34092.1. Correspondence of amino acid positions described herein is frequently expressed in terms of the positions of the amino acids of the form of wild-type human calcineurin heterodimer a polypeptide set forth in (GenBank: ACX34092.1).

[0340] In another particular embodiment, said mutant form can comprise at least one mutated amino acid of the wild type calcineurin heterodimer b at positions: V120, N123, L124 or K125, preferably double mutations at positions L124 and K125. In a particular embodiment, the valine at position 120 can be replaced with a serine, an aspartic acid, phenylalanine or leucine residue; the asparagine at position 123 can be replaced with a tryptophan, lysine, phenylalanine, arginine, histidine or serine; the leucine at position 124 can be replaced with a threonine residue; the lysine at position 125 can be replaced with an alanine, a glutamic acid, tryptophan, or two residues such as leucine-arginine or isoleucine-glutamic acid can be added after the lysine at position 125 in the amino acid sequence corresponding to GenBank: ACX34095.1. Correspondence of amino acid positions described herein is frequently expressed in terms of the positions of the amino acids of the form of wild-type human calcineurin heterodimer b polypeptide set forth in (GenBank: ACX34095.1).

[0341] Another drug resistance gene is 0(6)-methylguanine methyltransferase (MGMT) encoding human alkyl guanine transferase (hAGT). AGT is a DNA repair protein that confers resistance to the cytotoxic effects of alkylating agents, such as nitrosoureas and temozolomide (TMZ). 6-benzylguanine (6-BG) is an inhibitor of AGT that potentiates nitrosourea toxicity and is co-administered with TMZ to potentiate the cytotoxic effects of this agent. Several mutant forms of MGMT that encode variants of AGT are highly resistant to inactivation by 6-BG, but retain their ability to repair DNA damage (Maze, Kurpad et al. 1999). In a particular embodiment, AGT mutant form can comprise a mutated amino acid of the wild type AGT position P140, in the amino acid sequence SEQ ID NO: 18 (UniProtKB: P16455). In a preferred embodiment, said proline at position 140 is replaced with a lysine residue.

[0342] Another drug resistance gene can be multidrug resistance protein 1 (MDR1) gene. This gene encodes a membrane glycoprotein, known as P-glycoprotein (P-GP) involved in the transport of metabolic byproducts across the cell membrane. The P-Gp protein displays broad specificity towards several structurally unrelated chemotherapy agents.

[0343] Overexpressing multidrug resistance protein 1 has been described to confer resistance to drugs such as Mitoxantrone (Charles S. Morrow, Christina Peklak-Scott, Bimjhana Bishwokarma, Timothy E. Kute, Pamela K. Smitherman, and Alan J. Townsend. Multidrug Resistance Protein 1 (MRP1, ABCC1) Mediates Resistance to Mitoxantrone via Glutathione-Dependent Drug Efflux Mol Pharmacol April 2006 69:1499-1505).

[0344] Thus, drug resistance can be conferred to cells by the expression of nucleic acid sequence that encodes MDR-1 (NP_000918).

[0345] Still another way of preparing drug resistant cells according to the invention is to prepare cells with specific mutation (s) such as mutations at Arg486 and Glu571 in the Human Topoisomerase II gene, to confer resistance to amsacrine (S. PATEL, B. A. KELLER, and L. M. FISHER. 2000. MOLECULAR PHARMACOLOGY. Vol 57: p784-791 (2000).

[0346] Still another way of preparing drug resistant cells according to the invention is to prepare cells overexpressing microRNA-21 to confer resistance to Daunorubicine (Involvement of miR-21 in resistance to daunorubicin by regulating PTEN expression in the leukaemia K562 cell line Bai, Haitao et al. FEBS Letters, Volume 585, Issue 2, 402-408).

[0347] In a preferred embodiment, cells of the invention are bearing such a drug resistance conferring mRNA or protein and also comprise an inhibitory mRNA or a gene, the expression of which is conditioned by another drug, allowing the selective destruction of said drug resistant cells of the invention in the presence of said other drug or upon administration of said other drug.

[0348] Drug resistance gene can also confer resistance to cytotoxic antibiotics, and can be ble gene or mcrA gene. Ectopic expression of ble gene or mcrA in an immune cell gives a selective advantage when exposed to the chemotherapeutic agent, respectively the bleomycine or the mitomycin C.

[0349] The most practical approach to gene therapy is the addition of a gene to engineer T-cell by using efficient gene delivery with vectors, preferably viral vector. Thus, in a particular embodiment, the present invention provides a method of conferring drug resistance to the CD123 immune cells of the invention by introducing a transgene preferably encoded by at least one vector into a cell.

[0350] The random insertion of genes into the genome may lead to the inappropriate expression of the inserted gene or the gene near the insertion site. Specific gene therapy using homologous recombination of exogenous nucleic acid comprising endogenous sequences to target genes to specific sites within the genome can allow a secure engineering of T-cells. As described above, the genetic modification step of the method according to the invention can comprise a step of introduction into cells of an exogeneous nucleic acid comprising at least a sequence encoding the drug resistance gene and a portion of an endogenous gene such that homologous recombination occurs between the endogenous gene and the exogeneous nucleic acid. In a particular embodiment, said endogenous gene can be the wild type “drug resistance” gene, such that after homologous recombination, the wild type gene is replaced by the mutant form of the gene which confers resistance to the drug.

[0351] Endonucleolytic breaks are known to stimulate the rate of homologous recombination. Thus, in a particular embodiment, the method of the invention further comprises the step of expressing in the cell a rare-cutting endonuclease which is able to cleave a target sequence within an endogenous gene. Said endogenous gene can encode for examples DHFR, IMPDH2, calcineurin or AGT. Said rare-cutting endonuclease can be a TALE-nuclease, a Zinc finger nuclease, a CRISPR/Cas9 endonuclease, a MBBBD-nuclease or a meganuclease.

[0352] Another example of enzyme which can be inactivated is human hypoxanthine-guanine phosphoribosyl transferase (HPRT) gene (Genbank: M26434.1). In particular HPRT can be inactivated in engineered T-cells to confer resistance to a cytostatic metabolite, the 6-thioguanine (6TG) which is converted by HPRT to cytotoxic thioguanine nucleotide and which is currently used to treat patients with cancer, in particular leukemias (Hacke, Treger et al. 2013). Guanines analogs are metabolized by HPRT transferase that catalyzes addition of phosphoribosyl moiety and enables the formation of TGMP Guanine analogues including 6 mercapthopurine (6MP) and 6 thioguanine (6TG) are usually used as lymphodepleting drugs to treat ALL. They are metabolized by HPRT (hypoxanthine phosphoribosyl transferase that catalyzes addition of phosphoribosyl moiety and enables formation TGMP. Their subsequent phosphorylations lead to the formation of their triphosphorylated forms that are eventually integrated into DNA. Once incorporated into DNA, thio GTP impairs fidelity of DNA replication via its thiolate groupment and generate random point mutation that are highly deleterious for cell integrity.

[0353] In another embodiment, the inactivation of the CD3 normally expressed at the surface of the T-cell can confer resistance to anti-CD3 antibodies such as teplizumab.

### Combination Treatment

[0354] The terms “therapeutic agent”, “chemotherapeutic agent”, or “drug” or “anti-cancer drug” as used herein refers to a medicament, preferably a compound or a derivative thereof that can interact with a cancer cell, thereby reducing the proliferative status of the cell and/or killing the cell. Examples of chemotherapeutic agents or “anti-cancer drug” include, but are not limited to, alkylating agents (e.g., Busulfan, Carboplatine, Chlorambucil, Cisplatine, Cyclophosphamide, Ifosfamide, Melphalan, Mechlorethamine, Oxaliplatine, Uramustine, •Temozolomide, Fotemustine), metabolic antagonists (e.g., purine nucleoside antimetabolite such as clofarabine, fludarabine or 2′-deoxyadenosine, methotrexate (MTX), 5-fluorouracil or derivatives thereof, Azathioprine, Capecitabine, Cytarabine, •Floxuridine, •Fluorouracile, •Gemcitabine, •Methotrexate, Pemetrexed), antitumor antibiotics (e.g., mitomycin, Adriamycin, Bleomycine, •Daunorubicine, •Doxorubicine, •Epirubicine, •Hydroxyurea, •Idarubicine, •Mitomycin C, •Mitoxantrone), plant-derived antitumor agents (e.g., vincristine, vindesine, Taxol, Vinblastine, •(Vinorelbine), •Docetaxel, •Paclitaxel), topoisomerase inhibitor (Irinotecan, •Topotecan, •Etoposide).

[0355] In a preferred embodiment, a therapeutic agent, a chemotherapy drug as used herein refers to a compound or a derivative thereof that may be used to treat cancer, in particular to treat a hematopoietic cancer cell and more particularly AML, and even more particular refractory relapsed AML thereby reducing the proliferative status of the cancer cell and/or killing the cancer cell.

[0356] Other Examples of chemotherapeutic agents include, but are not limited to Aracytine, Cytosine Arabinoside, Amsacrine, Daunorubicine, Idarubicine, Novantrone, Mitoxantrone, Vepeside, Etoposide (VP16), arsenic trioxyde, transretinoic acid, mechlorethamine, procarbazine, chlorambucil, and combination thereof.

[0357] In other embodiments of the present invention, cells of the invention are administered to a patient in conjunction with a drug (or an agent) selected from Aracytine, Cytosine Arabinoside, amsacrine, Daunorubicine, Idarubicine, Novantrone, Mitoxantrone, Vepeside, Etoposide (VP16), arsenic trioxyde, transretinoic acid, cytarabine, anthracyclines, 6-thioguanine, hydroxyurea, prednisone, and combination thereof.

[0358] Such agents may further include, but are not limited to, the anti-cancer agents TRIMETHOTRIXATE™ (TMTX), TEMOZOLOMIDE™, RALTRITREXED™, S-(4-Nitrobenzyl)-6-thioinosine (NBMPR), 6-benzyguanidine (6-BG), bis-chloronitrosourea (BCNU) and CAMPTOTHECIN™, or a therapeutic derivative of any thereof.

[0359] In a more preferred embodiment an anti-CD123 CAR of SEQ ID NO 31, of SEQ ID NO 32, or of SEQ ID NO 160 expressing T cell with a TCR and a dck KO gene, is administered to a patient, in combination with at least one therapeutic agent selected from Aracytine, Cytosine Arabinoside, Amsacrine, Daunorubicine, Idarubicine, Novantrone, Mitoxantrone, Vepeside, Etoposide (VP16), arsenic trioxyde, transretinoic acid and combination thereof.

[0360] An anti-CD123 CAR of SEQ ID NO 31, of SEQ ID NO 32, or of SEQ ID NO 160 expressing T cell with a TCR and a dck KO gene, in combination with at least one therapeutic agent selected from Aracytine, Cytosine Arabinoside, Amsacrine, Daunorubicine, Idarubicine, Novantrone, Mitoxantrone, Vepeside, Etoposide (VP16), arsenic trioxyde, transretinoic acid and combination thereof is used as a therapeutic agent.

[0361] Preferably, an anti-CD123 CAR of SEQ ID NO 31, of SEQ ID NO 32, or of SEQ ID NO 160 expressing T cell with a TCR and a dck KO gene, in combination with a purine analogue (fludarabine), is used as a therapeutic agent.

[0362] Preferably, an anti-CD123 CAR of SEQ ID NO 31, of SEQ ID NO 32, or of SEQ ID NO 160 expressing T cell with a TCR and a dck KO gene, in combination with a FLAG treatment, is used as a therapeutic agent.

[0363] In one embodiment, said CD123 CAR is selected from SEQ ID NO 76 to SEQ ID NO. 117 and expressed in a double TCR dCK KO T cells and combined to a purine analogue or to FLAG as a therapeutic agent.

[0364] In the present invention a combination treatment comprises infusion of a mAb for sorting and/or depletion purpose(s). In a preferred embodiment, said mAb is Rixutimab.

[0365] The maximum dose of Rituximab to be administered preferably by intravenous route is 2,250 mg/m2. It is no administered as an intravenous push or bolus.

### Multiple Drug Resistance of Anti-CD123 CAR-Expressing Immune Cells

[0366] In another particular embodiment, the inventors sought to develop an “off-the shelf” immunotherapy strategy, using allogeneic T-cells, in particular allogenic anti-CD123 CAR expressing T-cell resistant to multiple drugs to mediate selection of engineered T-cells when the patient is treated with different drugs. The therapeutic efficiency can be significantly enhanced by genetically engineering multiple drug resistance allogeneic T-cells. Such a strategy can be particularly effective in treating tumors that respond to drug combinations that exhibit synergistic effects. Moreover multiple resistant engineered T-cells can expand and be selected using minimal dose of drug agents.

[0367] Thus, the method according to the present invention can comprise modifying T-cell of the invention to confer multiple drug resistance to said T-cell of the invention. Said multiple drug resistance can be conferred by either expressing more than one drug resistance gene or by inactivating more than one drug sensitizing gene. In another particular embodiment, the multiple drug resistance can be conferred to said T-cell by expressing at least one drug resistance gene and inactivating at least one drug sensitizing gene. In particular, the multiple drug resistance can be conferred to said T-cell by expressing at least one drug resistance gene such as mutant form of DHFR, mutant form of IMPDH2, mutant form of calcineurin, mutant form of MGMT, the ble gene, and the mcrA gene and inactivating at least one drug sensitizing gene such as HPRT gene. In a preferred embodiment, multiple drug resistance can be conferred by inactivating HPRT gene and expressing a mutant form of DHFR; or by inactivating HPRT gene and expressing a mutant form of IMPDH2; or by inactivating HPRT gene and expressing a mutant form of calcineurin; by inactivating HPRT gene and expressing a mutant form of MGMT; by inactivating HPRT gene and expressing the ble gene; by inactivating HPRT gene and expressing the mcrA gene.

[0368] In one embodiment, the present invention provides allogenic anti-CD123 CAR expressing T-cell expressing more than one drug resistance gene or wherein more than one drug sensitizing gene is inactivated.

[0369] Suicide Genes in Anti-CD123 CAR-Expressing Immune Cells of the Invention

[0370] In some instances, since engineered T-cells can expand and persist for years after administration, it is desirable to include a safety mechanism to allow selective deletion of administrated T-cells. Thus, in some embodiments, the method of the invention comprises the transformation of said T-cells with a recombinant suicide gene. Said recombinant suicide gene is used to reduce the risk of direct toxicity and/or uncontrolled proliferation of said T-cells once administrated in a subject (Quintarelli C, Vera F, blood 2007; Tey S K, Dotti G., Rooney C M, boil blood marrow transplant 2007). Suicide genes enable selective deletion of transformed cells in vivo. In particular, the suicide gene has the ability to convert a non-toxic pro-drug into cytotoxic drug or to express the toxic gene expression product. In other words, “Suicide gene” is a nucleic acid coding for a product, wherein the product causes cell death by itself or in the presence of other compounds.

[0371] A representative example of such a suicide gene is one which codes for thymidine kinase of herpes simplex virus. Additional examples are thymidine kinase of varicella zoster virus and the bacterial gene cytosine deaminase which can convert 5-fluorocytosine to the highly toxic compound 5-fluorouracil. Suicide genes also include as non limiting examples caspase-9 or caspase-8 or cytosine deaminase. Caspase-9 can be activated using a specific chemical inducer of dimerization (CID). Suicide genes can also be polypeptides that are expressed at the surface of the cell and can make the cells sensitive to therapeutic monoclonal antibodies. As used herein “prodrug” means any compound useful in the methods of the present invention that can be converted to a toxic product. The prodrug is converted to a toxic product by the gene product of the suicide gene in the method of the present invention. A representative example of such a prodrug is ganciclovir which is converted in vivo to a toxic compound by HSV-thymidine kinase. The ganciclovir derivative subsequently is toxic to tumor cells. Other representative examples of prodrugs include acyclovir, FIAU [1-(2-deoxy-2-fluoro-β-D-arabinofuranosyl)-5-iodouracil], 6-methoxypurine arabinoside for VZV-TK, and 5-fluorocytosine for cytosine deaminase.

[0372] One preferred suicide gene system of the invention employs a recombinant antigenic polypeptide comprising antigenic motif recognized by the anti-CD20 mAb Rituximab, especially QBen10, such as in the so-called RQR8 polypeptide described in WO2013153391. Rituximab, an authorized antibody drug, can then be used for cell depletion when needed.

[0373] In one embodiment, the present invention provides a TCR KO-dCK KO anti-CD123 CAR of SEQ ID NO. 31 or 32 expressing T-cell, expressing a RQR8 suicide gene allowing said cells to be selectively destroyed.

[0374] More preferably, the present invention provides a TCR KO-dCK KO anti-CD123 CAR expressing T-cell, wherein said CD123 CAR comprises a suicide domain allowing CD123 CAR expressing cells to be selectively destroyed, preferably said suicide domain comprised at least two domains of SEQ ID NO 161, more preferably said CD123 CAR comprises a sequence of SEQ ID NO 171.

### CD123+/Luc+ Drug Resistant Daudi Cells for Testing the Cytotoxicity of Drug Resistant Allogenic CART Cells

[0375] The present invention encompasses also a method for manufacturing target cells which express both CD123 and are resistant to purine analogues. These target cells are particularly useful for testing the cytotoxicity of CD123 CAR T cells of the invention. These cells are readily resistant to clinically relevant dose of clofarabine and harbor luciferase activity. This combination of features enable traking them in vivo in a mice model or destroy them when required.

[0376] More particularly, they can be used to assess the cytotoxicity properties drug resistant T cells in mice in the presence of clofarabine or other PNAs. Clofarabine resistant Daudi cells mimick the physiological state of acute lymphoblastic leukemia (ALL) patients relapsing form induction therapy, that harbor drug resistant B cell malignancies. Thus, these cells are of great interest to evaluate the reliability and cytotoxicity of drug resistant CAR T cells. Preferably, these target cells are CD123+ Luciferase+ Daudi cells.

### Isolated Cell

[0377] The present invention relates to an isolated cell expressing a CD123 CAR which binds to CD123. Thus, the invention relates to an anti-CD123 CAR expressing cell. In a particular embodiment, said anti-CD123 CAR expressing cell is resistant to at least one drug and/or comprises at least one disrupted gene encoding a T-cell receptor component.

[0378] In a preferred embodiment, the present invention relates to an isolated T cell expressing a CAR which binds to CD123 and is resistant to at least one purine analogue and comprises a disrupted gene encoding a T-cell receptor alpha component.

[0379] In a more preferred embodiment, the present invention relates to an isolated T cell expressing a CAR of SEQ ID NO 31, 32 or 160 which binds to CD123 and destroys CD123 expressing cells and is resistant to at least one purine analogue and comprises a disrupted gene encoding a T-cell receptor alpha component.

[0380] In a more preferred embodiment, the present invention relates to an isolated T cell expressing a CAR of SEQ ID NO 160 which binds to CD123 and destroys CD123 expressing cells and is resistant to at least one purine analogue and comprises a disrupted gene encoding a T-cell receptor alpha component.

[0381] In a more preferred embodiment, the present invention relates to an isolated T cell expressing a CAR of SEQ ID NO 160 which binds to CD123 and destroys CD123 expressing cells and is resistant to at least one purine analogue and comprises a disrupted gene encoding a T-cell receptor beta component.

[0382] In another particular embodiment, said anti-CD123 CAR expressing T cell comprises at least one disrupted drug sensitizing gene such as dCK or HPRT gene. In a more particular embodiment, said isolated anti-CD123 CAR T-cell comprises a disrupted HPRT gene and express a DHFR mutant; said isolated anti-CD123 CAR T-cell comprises a disrupted HPRT gene and express a IMPDH2 mutant; said isolated anti-CD123 CAR T-cell comprises a disrupted HPRT gene and express a calcineurin mutant; said isolated anti-CD123 CAR T-cell comprises a disrupted HPRT gene and express a AGT mutant.

[0383] In particular, the present invention relates to an isolated T-cell, in particular an isolated allogeneic anti-CD123 CAR expressing T-cell, and preferably an isolated allogeneic anti-CD123 CAR expressing T-cell comprising a peptide having a sequence of SEQ ID NO. 31 32 or 160, said isolated allogeneic anti-CD123 CAR expressing T-cell is more particularly resistant to a purine analogue, and specifically suitable for immunotherapy in the presence of purine analogues.

[0384] In one aspect, the present invention provides methods for engineering an isolated immune cells to make it resistant to purine analogs (purine nucleotide analogs or PNA), such a clorofarabine or fludarabine, so that they can be used in cancer immunotherapy treatments in patients pre-treated with these conventional chemotherapies.

[0385] The resistance to drugs can be conferred to the isolated T-cell of the invention by inactivating one or more gene(s) responsible for the cell's sensitivity to the drug (drug sensitizing gene(s)), such as the dcK and/or HPRT genes.

### Immune Check Points

[0386] The present invention provides allogeneic dCK KO T-cells expressing an anti-CD123 CAR, in particular an anti-CD123 CAR of SEQ ID No 31, or of SEQ ID No 32, or of SEQ ID No 160 wherein at least one gene expressing one or more component of T-cell receptor (TCR) is inactivated and/or one gene selected from the genes CTLA4, PPP2CA, PPP2CB, PTPN6, PTPN22, PDCD1, LAG3, HAVCR2, BTLA, CD160, TIGIT, CD96, CRTAM, LAIR1, SIGLEC7, SIGLEC9, CD244, TNFRSF10B, TNFRSF10A, CASP8, CASP10, CASP3, CASP6, CASP7, FADD, FAS, TGFBRII, TGFBRI, SMAD2, SMAD3, SMAD4, SMAD10, SKI, SKIL, TGIF1, IL10RA, IL10RB, HMOX2, IL6R, IL6ST, CSK, PAG1, SIT1, FOXP3, PRDM1 (orblimp1), BATF, GUCY1A2, GUCY1A3, GUCY1B2, GUCY1B3, is inactivated as referred to in WO2014/184741.

[0387] According to further aspect of the invention, the immune cells can be further manipulated to make them more active or limit exhaustion, by inactivating genes encoding proteins that act as “immune checkpoints” that act as regulators of T-cells activation, such as the following gene selected from CTLA4, PPP2CA, PPP2CB, PTPN6, PTPN22, PDCD1, LAG3, HAVCR2, BTLA, CD160, TIGIT, CD96, CRTAM, LAIR1, SIGLEC7, SIGLEC9, CD244, TNFRSF10B, TNFRSF10A, CASP8, CASP10, CASP3, CASP6, CASP7, FADD, FAS, TGFBRII, TGFBRI, SMAD2, SMAD3, SMAD4, SMAD10, SKI, SKIL, TGIF1, IL10RA, IL10RB, HMOX2, IL6R, IL6ST, CSK, PAG1, SIT1, FOXP3, PRDM1 (orblimp1), BATF, GUCY1A2, GUCY1A3, GUCY1B2, GUCY1B3, preferably, said gene is PDCD1 or CTLA-4. Examples of genes, which expression could be reduced or suppressed in T cells of the invention are indicated in Table 9.

[0388] In one embodiment said gene is a gene that acts as a regulator of T-cells activation coding the beta 2 microglobulin protein.

[0389] According to a further aspect of the invention, the anti-CD123 CAR-immune cells of the invention can be further manipulated to make them resistant to a drug, in particular to a drug used during chemotherapy against cancer, in particular a CD123-expressing cell-mediated cancer such as AML. This can be achieved by introducing a gene conferring resistance to said drug. This same gene may be turned on and off by using a gene inducible inhibition/expression system as previously described (Garcia E L, Mills A A (2002) Getting around lethality with inducible Cre-mediated excision. Semin Cell Dev Biol 13:151-8, Lewandoski M (2001) Conditional control of gene expression in the mouse. Nat Rev Genet 2:743-55; Scharfenberger L, Hennerici T, Kirly G et al. (2014) Transgenic mouse technology in skin biology: Generation of complete or tissue-specific knockout mice. J Invest Dermatol 134:e16; Schwenk F, Kuhn R, Angrand P O et al. (1998) Temporally and spatially regulated somatic mutagenesis in mice. Nucleic Acids Res 26:1427-32.

[0390] Thus, anti-CD123 CAR of sequence corresponding to SEQ ID NO 31, to SEQ ID NO 32 or to SEQ ID NO 160-expressing, PNA resistant immune T cell, wherein (i) at least one gene expressing one or more component of T-cell receptor (TCR) is inactivated (ii) at least one gene conferring resistance to a drug (other than PNA) is incorporated or a gene conferring sensitivity to said drug (other than PNA) is deleted or mutated to be inactivated (iii) another gene selected from the gene disclosed in table 9 is inactivated—is an object of the present invention.

[0391] The present invention encompasses the isolated anti-CD123 CAR-immune cells or cell lines obtainable by the method of the invention, more particularly isolated cells comprising any of the proteins, polypeptides, allelic variants, altered or deleted genes or vectors described herein.

[0392] This object is provided for the treatment of a cancer, in particular AML, refractory relapse AML, BPDNL.

[0393] The immune cells of the present invention or cell lines can further comprise exogenous recombinant polynucleotides, in particular CARs or suicide gene(s) (encoding SEQ ID NO. 161) or they can comprise altered or deleted genes coding for checkpoint proteins or ligands thereof that contribute to their efficiency as a therapeutic product, ideally as an “off the shelf” product.

[0394] In another aspect, the present invention concerns the method for treating or preventing cancer in the patient by administrating at least once an engineered immune cell obtainable by the above methods.

TABLE 5
List of genes encoding immune checkpoint proteins modified in
engineered T cells of the invention

| | | Genes that can be inactivated |
|---|---|---|
| Pathway | | In the pathway |
| Co-inhibitory | CTLA4 (CD152) | CTLA4, PPP2CA, PPP2CB, |
| receptors | | PTPN6, PTPN22 (prefered) |
| | PDCD1 (PD-1, | PDCD1 (prefered and more |
| | CD279) | prefered) |
| | CD223 (lag3) | LAG3 |
| | HAVCR2 (tim3) | HAVCR2 |
| | BTLA(cd272) | BTLA |
| | CD160(by55) | CD160 |
| | IgSF family | TIGIT |
| | | CD96 |
| | | CRTAM |
| | LAIR1(cd305) | LAIR1 |
| | SIGLECs | SIGLEC7 |
| | | SIGLEC9 |
| | CD244(2b4) | CD244 |
| Death | TRAIL | TNFRSF10B, TNFRSF10A, |
| receptors | | CASP8, CASP10, CASP3, |
| | | CASP6, CASP7 |
| | FAS | FADD, FAS |
| Cytokine | TGF-beta signaling | TGFBRII, TGFBRI, SMAD2, |
| signalling | | SMAD3, SMAD4, SMAD10, |
| | | SKI, SKIL, TGIF1 |
| | IL10 signalling | IL10RA, IL10RB, HMOX2 |
| | IL6 signalling | IL6R, IL6ST |
| Prevention | | CSK, PAG1 |
| of TCR | | SIT1 |
| signalling | | |
| Induced Treg | induced Treg | FOXP3 |
| Transcription | transcription factors | PRDM1 (=blimp1, heterozygotes |
| factors | controlling | mice control chronic viral |
| controlling | exhaustion | infection better than wt or |
| exhaustion | | conditional KO) Stat 5 |
| | | BATF |
| Hypoxia | iNOS induced | GUCY1A2, GUCY1A3, |
| mediated | guanylated cyclase | GUCY1B2, GUCY1B3 |
| tolerance | | |

[0395] One, preferably two alleles, of above genes are modified in engineered T cells of the invention the locus is verified for each preparation of TALEN used to KO said gene/allele.

[0396] In a preferred embodiment said method of further engineer the immune cells involves introducing into said T cells polynucleotides, in particular mRNAs, encoding specific rare-cutting endonuclease to selectively inactivate the genes mentioned above by DNA cleavage. In a more preferred embodiment said rare-cutting endonucleases are TALE-nucleases or Cas9 endonuclease. TAL-nucleases have so far proven higher specificity and cleavage efficiency over the other types of rare-cutting endonucleases, making them the endonucleases of choice for producing of the engineered immune cells on a large scale with a constant turn-over.

### Delivery Methods

[0397] The different methods described above involve expressing a protein of interest such as drug resistance gene, rare-cutting endonuclease, Chimeric Antigen Receptor (CAR), in particular an anti-CD123 CAR and more particularly, a CAR comprising a SEQ ID NO. 31, or 32 or 160 and/including a suicide domain into an isolated cell.

[0398] As non-limiting example, said protein of interest can be expressed in the cell by its introduction as a transgene preferably encoded by at least one plasmid vector. Polypeptides may be expressed in the cell as a result of the introduction of polynucleotides encoding said polypeptides into the cell. Alternatively, said polypeptides could be produced outside the cell and then introduced thereto.

[0399] Methods for introducing a polynucleotide construct into cells are known in the art and include as non limiting examples stable transformation methods wherein the polynucleotide construct is integrated into the genome of the cell, transient transformation methods wherein the polynucleotide construct is not integrated into the genome of the cell and virus mediated methods.

[0400] Said polynucleotides may be introduced into a cell by for example, recombinant viral vectors (e.g. retroviruses, adenoviruses), liposome and the like. For example, transient transformation methods include for example microinjection, electroporation or particle bombardment, cell fusion. Said polynucleotides may be included in vectors, more particularly plasmids or virus, in view of being expressed in cells. Said plasmid vector can comprise a selection marker which provides for identification and/or selection of cells which received said vector.

[0401] Different transgenes can be included in one vector. Said vector can comprise a nucleic acid sequence encoding ribosomal skip sequence such as a sequence encoding a 2A peptide. 2A peptides, which were identified in the Aphthovirus subgroup of picornaviruses, causes a ribosomal “skip” from one codon to the next without the formation of a peptide bond between the two amino acids encoded by the codons (see Donnelly et al., J. of General Virology 82: 1013-1025 (2001); Donnelly et al., J. of Gen. Virology 78: 13-21 (1997); Doronina et al., Mol. And. Cell. Biology 28(13): 4227-4239 (2008); Atkins et al., RNA 13: 803-810 (2007)).

[0402] By “codon” is meant three nucleotides on an mRNA (or on the sense strand of a DNA molecule) that are translated by a ribosome into one amino acid residue. Thus, two polypeptides can be synthesized from a single, contiguous open reading frame within an mRNA when the polypeptides are separated by a 2A oligopeptide sequence that is in frame. Such ribosomal skip mechanisms are well known in the art and are known to be used by several vectors for the expression of several proteins encoded by a single messenger RNA.

[0403] In a more preferred embodiment of the invention, polynucleotides encoding polypeptides according to the present invention can be mRNA which is introduced directly into the cells, for example by electroporation. The inventors determined the optimal condition for mRNA electroporation in T-cell. The inventor used the cytoPulse technology which allows, by the use of pulsed electric fields, to transiently permeabilize living cells for delivery of material into the cells. The technology, based on the use of PulseAgile (BTX Havard Apparatus, 84 October Hill Road, Holliston, Mass. 01746, USA) electroporation waveforms grants the precise control of pulse duration, intensity as well as the interval between pulses (U.S. Pat. No. 6,010,613 and International PCT application WO2004083379). All these parameters can be modified in order to reach the best conditions for high transfection efficiency with minimal mortality. Basically, the first high electric field pulses allow pore formation, while subsequent lower electric field pulses allow moving the polynucleotide into the cell.

[0404] The different methods described above involve introducing a CD123 CAR of SEQ ID NO. 31, SEQ ID NO 32 or SEQ ID NO 160 into a cell. As non-limiting example, said CAR can be introduced as transgenes encoded by one plasmid vector. Said plasmid vector can also contain a selection marker which provides for identification and/or selection of cells which received said vector.

[0405] Polypeptides may be synthesized in situ in the cell as a result of the introduction of polynucleotides encoding said polypeptides into the cell. Alternatively, said polypeptides could be produced outside the cell and then introduced thereto. Methods for introducing a polynucleotide construct into cells are known in the art and including as non limiting examples stable transformation methods wherein the polynucleotide construct is integrated into the genome of the cell, transient transformation methods wherein the polynucleotide construct is not integrated into the genome of the cell and virus mediated methods. Said polynucleotides may be introduced into a cell by for example, recombinant viral vectors (e.g. retroviruses, adenoviruses), liposome and the like. For example, transient transformation methods include for example microinjection, electroporation or particle bombardment. Said polynucleotides may be included in vectors, more particularly plasmids or virus, in view of being expressed in cells.

[0406] Engineered Immune Cells

[0407] The present invention also relates to isolated cells or cell lines susceptible to be obtained by said method to engineer cells. In particular said isolated cell comprises at least one CAR as described above. In another embodiment, said isolated cell comprises a population of CARs each one comprising different extracellular ligand binding domains. In particular, said isolated cell comprises exogenous polynucleotide sequence encoding CAR. Genetically modified immune cells of the present invention are activated and proliferate independently of antigen binding mechanisms.

[0408] In the scope of the present invention is also encompassed an isolated immune cell, preferably a T-cell obtained according to any one of the methods previously described. Said immune cell refers to a cell of hematopoietic origin functionally involved in the initiation and/or execution of innate and/or adaptative immune response. Said immune cell according to the present invention can be derived from a stem cell. The stem cells can be adult stem cells, non-human embryonic stem cells, more particularly non-human stem cells, cord blood stem cells, progenitor cells, bone marrow stem cells, induced pluripotent stem cells, totipotent stem cells or hematopoietic stem cells. Representative human cells are CD34+ cells. Said isolated cell can also be a dendritic cell, killer dendritic cell, a mast cell, a NK-cell, a B-cell or a T-cell selected from the group consisting of inflammatory T-lymphocytes, cytotoxic T-lymphocytes, regulatory T-lymphocytes or helper T-lymphocytes. In another embodiment, said cell can be derived from the group consisting of CD4+T-lymphocytes and CD8+T-lymphocytes. Prior to expansion and genetic modification of the cells of the invention, a source of cells can be obtained from a subject through a variety of non-limiting methods. Cells can be obtained from a number of non-limiting sources, including peripheral blood mononuclear cells, bone marrow, lymph node tissue, cord blood, thymus tissue, tissue from a site of infection, ascites, pleural effusion, spleen tissue, and tumors. In certain embodiments of the present invention, any number of T cell lines available and known to those skilled in the art, may be used. In another embodiment, said cell can be derived from a healthy donor, from a patient diagnosed with cancer or from a patient diagnosed with an infection. In another embodiment, said cell is part of a mixed population of cells which present different phenotypic characteristics. In the scope of the present invention is also encompassed a cell line obtained from a transformed T-cell according to the method previously described. Modified cells resistant to an immunosuppressive treatment and susceptible to be obtained by the previous method are encompassed in the scope of the present invention.

[0409] As a preferred embodiment, the present invention provides T-cells or a population of T-cells endowed with a CD123 CAR having a sequence corresponding to SEQ ID NO. 31, SEQ ID NO. 32 or SEQ ID NO 160 as described above, that do not express functional TCR are resistant to PNA and that a reactive towards CD123 positive cells, for their adoptive transfer into patients, preferably into patients suffering AML, refractory relapse AML, BPDNL or a lymphoproliferative disorder, or as a treatment before bone marrow transplantation.

[0410] As a more preferred embodiment, the present invention provides T-cells or a population of T-cells endowed with a CD123 CAR CD123 CAR having a sequence corresponding to SEQ ID NO. 31, SEQ ID NO. 32 or SEQ ID NO 160 and that a reactive towards CD123 positive cells as described above, that do not express a functional TCR and are resistant to a selected PNA, for their allogeneic transplantation into patients treated with said selected PNA.

[0411] In an even more preferred embodiment, the present invention provides T-cells or a population of TRC KO dCK KO T-cells endowed with an anti-CD123 CAR comprising a polypeptide of CD123 CAR having a sequence corresponding to SEQ ID NO. 31, SEQ ID NO. 32 or SEQ ID NO 160 in combination with another treatment.

[0412] Activation and Expansion of T Cells

[0413] Whether prior to or after genetic modification of the T cells, even if the genetically modified immune cells of the present invention are activated and proliferate independently of antigen binding mechanisms, the immune cells, particularly T-cells of the present invention can be further activated and expanded generally using methods as described, for example, in U.S. Pat. Nos. 6,352,694; 6,534,055; 6,905,680; 6,692,964; 5,858,358; 6,887,466; 6,905,681; 7,144,575; 7,067,318; 7,172,869; 7,232,566; 7,175,843; 5,883,223; 6,905,874; 6,797,514; 6,867,041; and U.S. Patent Application Publication No. 20060121005. T cells can be expanded in vitro or in vivo.

[0414] Generally, the T cells of the invention are expanded by contact with an agent that stimulates a CD3 TCR complex and a co-stimulatory molecule on the surface of the T cells to create an activation signal for the T-cell. For example, chemicals such as calcium ionophore A23187, phorbol 12-myristate 13-acetate (PMA), or mitogenic lectins like phytohemagglutinin (PHA) can be used to create an activation signal for the T-cell.

[0415] As non-limiting examples, T cell populations may be stimulated in vitro such as by contact with an anti-CD3 antibody, or antigen-binding fragment thereof, or an anti-CD2 antibody immobilized on a surface, or by contact with a protein kinase C activator (e.g., bryostatin) in conjunction with a calcium ionophore. For co-stimulation of an accessory molecule on the surface of the T cells, a ligand that binds the accessory molecule is used. For example, a population of T cells can be contacted with an anti-CD3 antibody and an anti-CD28 antibody, under conditions appropriate for stimulating proliferation of the T cells. Conditions appropriate for T cell culture include an appropriate media (e.g., Minimal Essential Media or RPMI Media 1640 or, X-vivo 5, (Lonza)) that may contain factors necessary for proliferation and viability, including serum (e.g., fetal bovine or human serum), interleukin-2 (IL-2), insulin, IFN-g, 1L-4, 1L-7, GM-CSF, -10, -2, 1L-15, TGFp, and TNF- or any other additives for the growth of cells known to the skilled artisan. Other additives for the growth of cells include, but are not limited to, surfactant, plasmanate, and reducing agents such as N-acetyl-cysteine and 2-mercaptoethanoi. Media can include RPMI 1640, A1M-V, DMEM, MEM, a-MEM, F-12, X-Vivo 1, and X-Vivo 20, Optimizer, with added amino acids, sodium pyruvate, and vitamins, either serum-free or supplemented with an appropriate amount of serum (or plasma) or a defined set of hormones, and/or an amount of cytokine(s) sufficient for the growth and expansion of T cells. Antibiotics, e.g., penicillin and streptomycin, are included only in experimental cultures, not in cultures of cells that are to be infused into a subject. The target cells are maintained under conditions necessary to support growth, for example, an appropriate temperature (e.g., 37° C.) and atmosphere (e.g., air plus 5% CO2). T cells that have been exposed to varied stimulation times may exhibit different characteristics

[0416] In another particular embodiment, said cells can be expanded by co-culturing with tissue or cells. Said cells can also be expanded in vivo, for example in the subject's blood after administrating said cell into the subject.

### Pharmaceutical Compositions

[0417] Provided herein are pharmaceutical compositions comprising the genetically engineered immune cells of the invention, e.g., genetically engineered TCR KO-dCK KO CD123 CAR T cells having a sequence corresponding to SEQ ID NO. 31, SEQ ID NO. 32 or SEQ ID NO 160.

[0418] Provided herein are pharmaceutical compositions comprising the genetically engineered immune cells of the invention, e.g., genetically engineered TCR KO-dCK KO CD123 CAR T cells having a sequence corresponding to any one of the sequences selected from SEQ ID NO 188 to SEQ ID NO 197.

[0419] In another embodiment, pharmaceutical compositions comprising the genetically engineered immune T cells of the invention, e.g., genetically engineered TCR KO dCK KO CD123 CAR having any one of the sequence selected from having a sequence selected from SEQ ID NO. 34 to SEQ ID NO. 159, preferably from SEQ ID NO. 34, SEQ ID NO. 76, SEQ ID NO. 36, SEQ ID NO. 78; SEQ ID NO. 37, SEQ ID NO. 79, SEQ ID NO. 41, SEQ ID NO. 83, SEQ ID NO. 42, SEQ ID NO. 8), SEQ ID NO. 43, SEQ ID NO. 85, SEQ ID NO. 46, SEQ ID NO. 47, SEQ ID NO. 48, SEQ ID NO. 49, SEQ ID NO. 88, SEQ ID NO. 89, SEQ ID NO. 90, SEQ ID NO. 91, SEQ ID NO. 52, SEQ ID NO. 53, SEQ ID NO. 54, SEQ ID NO. 55, SEQ ID NO. 94, SEQ ID NO. 95, SEQ ID NO. 96, and SEQ ID NO. 97, T cells are provided.

[0420] In accordance with this disclosure, the term “pharmaceutical composition” relates to a composition for administration to an individual. In a preferred embodiment, the pharmaceutical composition comprises a composition for parenteral, transdermal, intraluminal, intra-arterial, intrathecal or intravenous administration (iv) or for direct injection into a cancer. It is in particular envisaged that said pharmaceutical composition is administered to the individual via infusion or injection iv. Administration of the suitable compositions may be effected by different ways, e.g., by intravenous (iv), subcutaneous, intraperitoneal, intramuscular, topical or intradermal administration.

[0421] The pharmaceutical composition of the present disclosure may further comprise a pharmaceutically acceptable carrier. Examples of suitable pharmaceutical carriers are well known in the art and include phosphate buffered saline solutions, water, emulsions, such as oil/water emulsions, various types of wetting agents, sterile solutions, etc. Compositions comprising such carriers can be formulated by well-known conventional methods. These pharmaceutical compositions can be administered to the subject at a suitable dose.

[0422] The dosage regimen will be determined by the attending physician and clinical factors. As is well known in the medical arts, dosages for any one patient depends upon many factors, including the patient's size, body surface area, age, the particular compound to be administered, sex, time and route of administration, general health, and other drugs being administered concurrently. An example of a dosage for administration might be in the range of 0.24 μg to 48 mg of cells according to the invention, preferably 0.24 μg to 24 mg, more preferably 0.24 μg to 2.4 mg, even more preferably 0.24 μg to 1.2 mg and most preferably 0.24 μg to 240 mg units per kilogram of body weight per day. Particularly preferred dosages are recited herein below. Progress can be monitored by periodic assessment.

[0423] The CAR cell compositions of the disclosure may be administered locally or systemically. Administration will generally be parenteral, e.g., intravenous; DNA may also be administered directly to the target site, e.g., by biolistic delivery to an internal or external target site or by catheter to a site in an artery. In a preferred embodiment, the pharmaceutical composition is administered subcutaneously and in an even more preferred embodiment intravenously. Preparations for parenteral administration include sterile aqueous or non-aqueous solutions, suspensions, and emulsions. Examples of non-aqueous solvents are propylene glycol, polyethylene glycol, vegetable oils such as olive oil, and injectable organic esters such as ethyl oleate. Aqueous carriers include water, alcoholic/aqueous solutions, emulsions or suspensions, including saline and buffered media. Parenteral vehicles include sodium chloride solution, Ringer's dextrose, dextrose and sodium chloride, lactated Ringer's, or fixed oils. Intravenous vehicles include fluid and nutrient replenishes, electrolyte replenishers (such as those based on Ringer's dextrose), and the like. Preservatives and other additives may also be present such as, for example, antimicrobials, anti-oxidants, chelating agents, and inert gases and the like. In addition, the pharmaceutical composition of the present disclosure might comprise proteinaceous carriers, like, e.g., serum albumin or immunoglobulin, preferably of human origin. It is envisaged that the pharmaceutical composition of the disclosure might comprise, in addition to the proteinaceous bispecific single chain antibody constructs or nucleic acid molecules or vectors encoding the same (as described in this disclosure), further biologically active agents, depending on the intended use of the pharmaceutical composition.

[0424] Any of the compositions described herein may be comprised in a kit. In a non-limiting example, one or more cells according to the invention for use in cell therapy and/or the reagents to generate one or more cells for use in cell therapy that harbors recombinant expression vectors may be comprised in a kit. The kit components are provided in suitable container means.

[0425] Some components of the kits may be packaged either in aqueous media or in lyophilized form and under frozen packages. The container means of the kits will generally include at least one vial, test tube, flask, bottle, syringe or other container means, into which a component may be placed, and preferably, suitably aliquoted. Where there are more than one component in the kit, the kit also will generally contain a second, third or other additional container into which the additional components may be separately placed. However, various combinations of components may be comprised in a vial. The kits also will typically include a means for containing the components in close confinement for commercial sale. Such containers may include injection or blow molded plastic containers into which the desired vials are retained.

[0426] When the components of the kit are provided in one and/or more liquid solutions, the liquid solution is an aqueous solution, with a sterile aqueous solution being particularly useful. In some cases, the container means may itself be a syringe, pipette, and/or other such like apparatus, from which the formulation may be applied to an infected area of the body, injected into an animal, and/or even applied to and/or mixed with the other components of the kit.

[0427] In a preferred embodiment one and/or more liquid solutions is cryoresistant.

[0428] However, the components of the kit or part of it may be provided as dried powder(s) or as a tablet. When reagents and/or components are provided as a dry powder, the powder can be reconstituted by the addition of a suitable solvent. It is envisioned that the solvent may also be provided in another container means. The kits may also comprise a second container means for containing a sterile, pharmaceutically acceptable buffer and/or other diluent.

[0429] In particular embodiments, cells that are to be used for cell therapy are provided in a kit, and in some cases the cells are essentially the sole component of the kit. The kit may comprise reagents and materials to make the desired cell. In specific embodiments, the reagents and materials include primers for amplifying desired sequences, nucleotides, suitable buffers or buffer reagents, salt, and so forth, and in some cases the reagents include vectors and/or DNA that encodes a CAR molecule as described herein and/or regulatory elements therefor.

[0430] In particular embodiments, there are one or more apparatuses in the kit suitable for extracting one or more samples from an individual. The apparatus may be a syringe, scalpel, and so forth.

[0431] In some cases, the kit, in addition to cell therapy embodiments, also includes a second cancer therapy, such as chemotherapy, hormone therapy, and/or immunotherapy, for example. The kit(s) may be tailored to a particular cancer for an individual and comprise respective second cancer therapies for the individual. Preferably, said other cancer therapy is a purine analogue, a FLAG treatment.

[0432] Therapeutic uses of engineered T-cells Comprising a CD123 CAR of the invention.

[0433] In various embodiments CAR constructs, nucleic acid sequences, vectors, host cells, as contemplated herein and/or pharmaceutical compositions comprising the same are used for the prevention, treatment or amelioration of a cancerous disease, such as a tumorous disease. In particular embodiments, the pharmaceutical composition of the present disclosure may be particularly useful in preventing, ameliorating and/or treating cancer, including cancer having solid tumors, for example.

[0434] In particular embodiments, provided herein are a method of treating an individual for cancer, comprising the step of providing a therapeutically effective amount of a plurality of any of cells of the disclosure to the individual.

[0435] In certain aspects, the cancer is a solid tumor, and the tumor may be of any size, but in specific embodiments, the solid tumors are about 2 mm or greater in diameter. In certain aspects, the method further comprises the step of providing a therapeutically effective amount of an additional cancer therapy to the individual.

[0436] As used herein “treatment” or “treating,” includes any beneficial or desirable effect on the symptoms or pathology of a disease or pathological condition, and may include even minimal reductions in one or more measurable markers of the disease or condition being treated, e.g., cancer. Treatment can involve optionally either the reduction or amelioration of symptoms of the disease or condition, or the delaying of the progression of the disease or condition. “Treatment” does not necessarily indicate complete eradication or cure of the disease or condition, or associated symptoms thereof.

[0437] As used herein, “prevent,” and similar words such as “prevented,” “preventing” etc., indicate an approach for preventing, inhibiting, or reducing the likelihood of the occurrence or recurrence of, a disease or condition, e.g., cancer. It also refers to delaying the onset or recurrence of a disease or condition or delaying the occurrence or recurrence of the symptoms of a disease or condition. As used herein, “prevention” and similar words also includes reducing the intensity, effect, symptoms and/or burden of a disease or condition prior to onset or recurrence of the disease or condition.

[0438] In particular embodiments, the present invention contemplates, in part, cells, CAR constructs, nucleic acid molecules and vectors that can administered either alone or in any combination using standard vectors and/or gene delivery systems, and in at least some aspects, together with a pharmaceutically acceptable carrier or excipient. In certain embodiments, subsequent to administration, said nucleic acid molecules or vectors may be stably integrated into the genome of the subject.

[0439] In specific embodiments, viral vectors may be used that are specific for certain cells or tissues and persist in said cells. Suitable pharmaceutical carriers and excipients are well known in the art. The compositions prepared according to the disclosure can be used for the prevention or treatment or delaying the above identified diseases.

[0440] Furthermore, the disclosure relates to a method for the prevention, treatment or amelioration of a tumorous disease comprising the step of administering to a subject or individual in the need thereof an effective amount of immune cells, e.g., T cells or cytotoxic T lymphocytes, harboring a CD123 CAR of SEQ ID NO. 31 or a CD123 CAR of SEQ ID NO. 32 or a CD123 CAR of SEQ ID NO. 160; a nucleic acid sequence encoding a the same; a vector comprising a nucleotide sequence encoding said CD123 CAR, as described herein and/or produced by a process as described herein.

[0441] Possible indications for administration of the composition(s) of the exemplary CD123 CAR cells are cancerous diseases, including tumorous diseases, including:

[0442] The administration of the composition(s) of the disclosure is useful for all stages and types of lymphoproliferative disorder, including for minimal residual disease, early cancer, advanced cancer, and/or relapsed and/or refractory cancer.

[0443] The disclosure further encompasses co-administration protocols with other compounds, e.g. bispecific antibody constructs, targeted toxins or other compounds, which act via immune cells.

[0444] The clinical regimen for co-administration of the inventive compound(s) may encompass co-administration at the same time, before or after the administration of the other component. Particular combination therapies include chemotherapy, radiation, surgery, hormone therapy, or other types of immunotherapy.

[0445] Particular doses for therapy may be determined using routine methods in the art. However, in specific embodiments, the engineered CD123 T cells of the invention are delivered to an individual in need thereof once, although in some cases it is multiple times, including 2, 3, 4, 5, 6, or more times. When multiple doses are given, the span of time between doses may be of any suitable time, but in specific embodiments, it is days or weeks or months between the doses. Doses and origins of the T cell donor are selected to avoid any undesirable side effects. The time between doses may vary in a single regimen and may depend on the recipient (patient in need thereof). In particular embodiments, the time between doses is 2, 3, 4, 5, 6, 7, 8, 9, 10, or more days or weeks. In specific cases, it is between 4-8 or 6-8 weeks, for example.

[0446] In specific embodiments, one regimen includes one of the following dose regimen

of CD123 T cell of the invention:
11×10⁴/m²,
11×10⁵/m²,
11×10⁶/m²,
23×10⁶/m²,
31×10⁷/m² 43×10⁷/m²,
51×10⁸/m²,
or from 10⁴ to from 10¹⁰ cells/kg.

[0447] In an alternative embodiment, the T cells are provided to the individual in the following dose regimen:

### Dose Level CD123 CTL Dose

[0448] 11×10⁶/m²,
21×10⁷/m²,
31×10⁸/m²,
6 10⁴ to from 5·10⁸ cells/kg,

[0449] An efficient amount of the CD123 CAR engineered immune cell of the invention corresponds to such dose that may be adapted depending on the status of each treated individual.

[0450] Therapeutic Applications

[0451] In another embodiment, isolated cell(s) obtained by the different methods or cell derived (after one to 50 in vitro passages) from said isolated cell of the invention can be used as a medicament. Genetically engineered TCR KO dCK KO CD123 CART cells of the invention that can be used as a medicament can be those having a CD123 CAR having a sequence corresponding to any one of SEQ ID NO. 31, SEQ ID NO. 32, SEQ ID NO 160, SEQ ID NO. 34, to SEQ ID NO. 159.

[0452] In a preferred embodiment a genetically engineered TCR KO dCK KO CD123 CAR T cells having a sequence corresponding to SEQ ID NO. 31, SEQ ID NO. 32 or SEQ ID NO 160. is provided for use as a medicament.

[0453] In another preferred embodiment, a, genetically engineered TCR KO dCK KO CD123 CAR T cells having any one of the sequence selected from having a sequence selected from SEQ ID NO. 34, SEQ ID NO. 76, SEQ ID NO. 36, SEQ ID NO. 78, SEQ ID NO. 37, SEQ ID NO. 79, SEQ ID NO. 41, SEQ ID NO. 83, SEQ ID NO. 42, SEQ ID NO. 8), SEQ ID NO. 43, SEQ ID NO. 85, SEQ ID NO. 46, SEQ ID NO. 47, SEQ ID NO. 48, SEQ ID NO. 49, SEQ ID NO. 88, SEQ ID NO. 89, SEQ ID NO. 90, SEQ ID NO. 91, SEQ ID NO. 52, SEQ ID NO. 53, SEQ ID NO. 54, SEQ ID NO. 55, SEQ ID NO. 94, SEQ ID NO. 95, SEQ ID NO. 96, SEQ ID NO. 97, is provided for use as a medicament.

[0454] In another preferred embodiment, a genetically engineered TCR KO dCK KO CD123 CAR T cells having any one of the sequence selected from SEQ ID NO. 160, SEQ ID NO. 188, SEQ ID NO. 189, SEQ ID NO. 190, SEQ ID NO. 191; SEQ ID NO. 192, SEQ ID NO. 193, SEQ ID NO. 194, SEQ ID NO. 195, SEQ ID NO. 196, SEQ ID NO. 197 is provided for use as a medicament.

[0455] In another embodiment, said medicament can be used for treating cancer, particularly for the treatment of B-cell lymphomas and leukemia in a patient in need thereof.

[0456] In another embodiment, said isolated cell according to the invention or cell line derived from said isolated cell can be used in the manufacture of a medicament for treatment of a cancer in a patient in need thereof.

[0457] In a particular embodiment, an anti-CD123 CAR expressing T cell is provided as a medicament for the treatment of AML, of an AML subtype, of an AML-related complication, of an AML-related condition. In a preferred embodiment, an anti-CD123 CAR expressing T cell wherein said anti-CD123 CAR comprises SEQ ID NO 31, SEQ ID NO 32 or SEQ ID NO 160 is provided as a medicament.

[0458] In another embodiment, said medicament can be used for treating a CD123-expressing cell-mediated pathological condition or a condition characterized by the direct or indirect activity of a CD123-expressing cell. In other words, the invention is related to an anti-CD123 CAR expressing T cell comprising 80% to 100% of SEQ ID NO 31, SEQ ID NO 32 or SEQ ID NO 160 for its use as a medicament to treat a condition linked to the detrimental activity of CD123-expressing cells, in particular to treat a condition selected from AML, AML subtype, AML-related complication, and AML-related conditions;

[0459] In another aspect, the present invention relies on methods for treating patients in need thereof, said method comprising at least one of the following steps:
[0460] (a) providing an immune-cell obtainable by any one of the methods previously described;
[0461] (b) Administrating said transformed immune cells to said patient,

[0462] On one embodiment, said T cells of the invention can undergo robust in vivo T cell expansion and can persist for an extended amount of time.

[0463] In a preferred embodiment said T cell is destroyed by administration of a drug or an antibody that selectively destroys said T cells.

[0464] In a more preferred embodiment genetically engineered TCR KO dCK KO CD123 CAR T cells of the invention having a CD123 CAR having a sequence corresponding to any one of SEQ ID NO. 31, SEQ ID NO. 32, SEQ ID NO 160, SEQ ID NO. 34, to SEQ ID NO. 159 are uses as a medicament/a treatment and then cleared up from the patient using an antibody recognizing the suicide domain RQR8, or CD20 domain, or SEQ ID NO 161—using preferably rituximab.

[0465] Said treatment can be ameliorating, curative or prophylactic. It may be either part of an autologous immunotherapy or part of an allogenic immunotherapy treatment. By autologous, it is meant that cells, cell line or population of cells used for treating patients are originating from said patient or from a Human Leucocyte Antigen (HLA) compatible donor. By allogeneic is meant that the cells or population of cells used for treating patients are not originating from said patient but from a donor.

[0466] Cells of the invention that can be used with the disclosed methods are described in the previous section. Said treatment can be used to treat patients diagnosed wherein a pre-malignant or malignant cancer condition characterized by CD123-expressing cells, especially by an overabundance of CD123-expressing cells. Such conditions are found in hematologic cancers, such as leukemia or malignant lymphoproliferative disorders. Lymphoproliferative disorder can be lymphoma, in particular multiple myeloma, non-Hodgkin's lymphoma, Burkitt's lymphoma, and follicular lymphoma (small cell and large cell).

[0467] Cancers that may be treated using the cells of the invention or a pharmaceutical composition comprising said cell may comprise nonsolid tumors (such as hematological tumors, including but not limited to pre-B ALL (pediatric indication), adult ALL, mantle cell lymphoma, diffuse large B-cell lymphoma, BPDNL, AML, refractory relapse AML, or before bone marrow transplantation.

[0468] Types of cancers to be treated with the CD123 cell expressing CARs of the invention include, but are not limited leukemia or lymphoid malignancies. Adult tumors/cancers and pediatric tumors/cancers are also included.

[0469] In one embodiment, the present invention provides a pharmaceutical composition for its use in the treatment of a CD123 expressing cells-mediated disease, in particular a CD123 expressing cells—mediated hematologic cancer, said composition comprising said anti-CD123 CAR expressing T cell of the invention, preferably said anti-CD123 CAR is of SEQ ID NO 31, SEQ ID NO 32 or SEQ ID NO 160, more preferably having a sequence selected from SEQ ID NO. 160, SEQ ID NO. 188, SEQ ID NO. 189, SEQ ID NO. 190, SEQ ID NO. 191; SEQ ID NO. 192, SEQ ID NO. 193, SEQ ID NO. 194, SEQ ID NO. 195, SEQ ID NO. 196, SEQ ID NO. 197 Any other CD123-mediating or CD123-involving malignant lymphoproliferative disorders disclosed herein may be improved with the anti-CD123 CAR-expressing cells of the present invention.

[0470] In a preferred embodiment, the cancer that may be treated using the anti-CD123 CAR-expressing cells of the present invention is leukemia (AML), a disease associated to leukemia or a complication thereof.

[0471] Leukemias that can be treated using the anti-CD123 CAR-expressing cells of the present invention can be acute myelogenous leukemia (AML), chronic myelogenous leukemia, melodysplastic syndrome, acute lymphoid leukemia, chronic lymphoid leukemia, and myelodysplastic syndrome.

[0472] AML or AML subtypes that may be treated using the anti-CD123 CAR-expressing cells of the present invention may be in particular, acute myeloblastic leukemia, minimally differentiated acute myeloblastic leukemia, acute myeloblastic leukemia without maturation, acute myeloblastic leukemia with granulocytic maturation, promyelocytic or acute promyelocytic leukemia (APL), acute myelomonocytic leukemia, myelomonocytic together with bone marrow eosinophilia, acute monoblastic leukemia (M5a) or acute monocytic leukemia (M5b), acute erythroid leukemias, including erythroleukemia (M6a) and very rare pure erythroid leukemia (M6b), acute megakaryoblastic leukemia, acute basophilic leukemia, acute panmyelosis with myelofibrosis, whether involving CD123-positive cells.

[0473] Subtypes of AML that may be treated using the anti-CD123 CAR-expressing cells of the present invention also include, hairy cell leukemia, philadelphia chromosome-positive acute lymphoblastic leukemia.

[0474] AML may be classified as AML with specific genetic abnormalities. Classification is based on the ability of karyotype to predict response to induction therapy, relapse risk, survival.

[0475] Accordingly, AML that may be treated using the anti-CD123 CAR-expressing cells of the present invention of SEQ ID NO 31, SEQ ID NO 32 or SEQ ID NO 160 may be AML with a translocation between chromosomes 8 and 21, AML with a translocation or inversion in chromosome 16, AML with a translocation between chromosomes 9 and 11, APL (M3) with a translocation between chromosomes 15 and 17, AML with a translocation between chromosomes 6 and 9, AML with a translocation or inversion in chromosome 3, AML (megakaryoblastic) with a translocation between chromosomes 1 and 22.

[0476] The present invention is particularly useful for the treatment of AML associated with these particular cytogenetic markers.

[0477] The present invention also provides an anti-CD123 CAR expressing T cell of SEQ ID NO 31, SEQ ID NO 32 or SEQ ID NO 160 for the treatment of patients with specific cytogenetic subsets of AML, such as patients with t(15; 17)(q22; q21) identified using all-trans retinoic acid (ATRA)16-19 and for the treatment of patients with t(8; 21)(q22; q22) or inv(16)(p13q22)/t(16; 16)(p13; q22) identified using repetitive doses of high-dose cytarabine.

[0478] Preferably, the present invention provides an anti-CD123 CAR expressing T cell of SEQ ID NO 31, SEQ ID NO 32 or SEQ ID NO 160 for the treatment of patients with aberrations, such as −5/del(5q), −7, abnormalities of 3q, or a complex karyotype, who have been shown to have inferior complete remission rates and survival, in combination with a FLAG.

### Group of Patients

[0479] In a preferred embodiment, the invention provides an anti-CD123 CAR expressing T cell of SEQ ID NO 31, SEQ ID NO 32 or SEQ ID NO 160 as a treatment for AML in patients over 60 years or in patients of less than 20 years.

[0480] In a more preferred embodiment, the present invention provides an anti-CD123 CAR expressing T cell of SEQ ID NO 31, SEQ ID NO 32 or SEQ ID NO 160 for use as a pediatric treatment, in particular a pediatric treatment against AML, or AML-related diseases or complications.

[0481] In still another preferred embodiment, the present invention is used as a treatment in AML patients with low, poor or unfavorable status that is to say with a predicted survival of less than 5 years survival rate. In this group, patients suffering AML with the following cytogenetic characteristics: −5; 5q; −7; 7q-; 11q23; non t(9; 11); inv(3); t(3; 3); t(6; 9); t(9; 22) is associated with poor-risk status (Byrd J. C. et al., Dec. 15, 2002; Blood: 100 (13) and is especially contemplated to be treated according to the present invention or with an object of the present invention.

[0482] In one embodiment, the anti-CD123 CAR expressing T cell of present invention may be used as induction therapy, as post remission therapy of AML or as a consolidation therapy in patient with AML. Preferably, TRC KO cells or TCR KO and dck KO T cells expressing an anti-CD123 CAR of SEQ ID NO. 31, SEQ ID NO. 32 or SEQ ID NO. 160 are used as post remission therapy of AML or as a consolidation therapy in patient with AML.

[0483] In one embodiment, the TCR KO, dck KO, anti-CD123 CAR of SEQ ID NO 31, SEQ ID NO 32 or SEQ ID NO 160 expressing T cell of the present invention may be used in case of AML relapse, or in case of refractory or resistant AML. Preferably, said TCR KO T dck KO, anti-CD123 CAR of SEQ ID NO 31, SEQ ID NO 32 or SEQ ID NO 160 expressing T cell of the present invention are used in patients with AML relapse, or with refractory or resistant AML, more preferably, in combination with at least one other anti-cancer drug

[0484] In another preferred embodiment, TCR KO, dck KO, anti-CD123 CAR of SEQ ID NO 31, SEQ ID NO 32 or SEQ ID NO 160 expressing T cell of the present invention is used for preventing cancer cells development occurring in particular after anti-cancer treatment, during bone marrow depletion or before bone marrow transplantation, after bone marrow destruction.

### AML Complications

[0485] In one particular embodiment the invention provides a medicament that improves the health condition of a patient, in particular a patient undergoing a complication related to AML. More preferably, said TCR KO, dck KO, anti-CD123 CAR of SEQ ID NO 31, SEQ ID NO 32 or SEQ ID NO 160 expressing T cell is used as a medicament for the treatment of a complication related to AML, preferably with FLAG.

[0486] A complication or disease related to AML may include a preceding myelodysplasia phase, secondary leukemia, in particular secondary AML, high white blood cell count, and absence of Auer rods. Among others, leukostasis and involvement of the central nervous system (CNS), Hyperleukocytosis, residual disease, are also considered as a complication or disease related to AML.

### AML Associated Diseases

[0487] In one embodiment, the present invention also provides a TCR KO, dck KO, anti-CD123 CAR of SEQ ID NO 31, SEQ ID NO 32 or SEQ ID NO 160 expressing T cell for the treatment of a pathological condition related to AML. Preferably, the present invention provides a TCR KO, dck KO, anti-CD123 CAR of SEQ ID NO 31, SEQ ID NO 32 or SEQ ID NO 160 expressing T cell for the treatment of a pathological condition related to AML.

[0488] The present invention provides a therapy (a TCR KO, dck KO, anti-CD123 CAR of SEQ ID NO 31, SEQ ID NO 32 or SEQ ID NO 160 expressing T cell, preferably having a sequence selected from SEQ ID NO. 160, SEQ ID NO. 188, SEQ ID NO. 189, SEQ ID NO. 190, SEQ ID NO. 191; SEQ ID NO. 192, SEQ ID NO. 193, SEQ ID NO. 194, SEQ ID NO. 195, SEQ ID NO. 196, SEQ ID NO. 197) for AML related myeloid neoplasms, for acute myeloid leukemia and myelodysplastic syndrome, a treatment of relapsed or refractory acute myeloid leukemia, a treatment of relapsed or refractory acute promyelocytic leukemia in adults, a treatment for acute promyeloid leukaemia, a treatment of acute myeloid leukemia in adults over 60 years.

[0489] According to another aspect, the present invention provides a composition for the treatment of AML associated diseases, in particular hematologic malignancy related to AML.

[0490] Hematologic malignancy related to AML conditions include myelodysplasia syndromes (MDS, formerly known as “preleukemia”) which are a diverse collection of hematological conditions united by ineffective production (or dysplasia) of myeloid blood cells and risk of transformation to AM

[0491] In another embodiment, the invention provides a medicament that improves the health state of a patient suffering multiple myeloma.

[0492] Other pathological conditions or genetic syndromes associated with the risk of AML can be improved with the adequate use of the present invention, said genetic syndromes include Down syndrome, trisomy, Fanconi anemia, Bloom syndrome, Ataxia-telangiectasia, Diamond-Blackfan anemia, Schwachman-Diamond syndrome, Li-Fraumeni syndrome, Neurofibromatosis type 1, Severe congenital neutropenia (also called Kostmann syndrome)

### Other CD123-Mediated Pathological Conditions

[0493] According to another aspect, the present invention provides a composition for the treatment of CD123+ cell-mediated diseases. These CD123+ cell mediated diseases include inflammation, autoimmune diseases.

[0494] In particular, the present invention can be used for the treatment of CD123+ cell mediated diseases such as inflammation of the gastrointestinal mucosae and more particularly, inflammatory bowel diseases, nasal allergy, inflammation of the skin such as juvenile dermatomyositis, hematodermia.

[0495] The present invention can be used as a medicament for the treatment of CD123+ cell mediated diseases such as autoimmune diseases in particular Kikushi disease.

[0496] Preferably, the present invention provides a treatment for a recurrent infection including infection due to viruses such as Epstein-Barr virus, herpes simplex virus, in particular oncogenic viruses, HHV-8, HHV-6, HTLV or HIV, parasitic infection such as infection due to plasmodium falciparum, Plasmodium vivax, Plasmodium ovale, or Plasmodium malariae.

[0497] In particular, the present invention provides a treatment for Epstein-Barr virus lymphadenitis, herpes simplex virus lymphadenitis.

[0498] In another aspect, the present invention provides a composition for the treatment of systemic lupus erythematosus lymphadenitis, tuberculosis, cystic fibrosis, hepatitis, biliary atresia, in particular virus-induced hepatitis or biliary atresia in children, autoimmune hepatitis; primary biliary cirrhosis.

[0499] Composition Comprising an Engineered T Cells According to the Invention for Use as a Medicament and Method

[0500] The present invention also provides a composition comprising a genetically engineered immune TCR KO-dCK KO-CD123 CAR having a sequence corresponding to SEQ ID NO. 31, SEQ ID NO. 32 or SEQ ID NO 160 T cells, or endowed with a sequence selected from SEQ ID NO. 160, SEQ ID NO. 188, SEQ ID NO. 189, SEQ ID NO. 190, SEQ ID NO. 191; SEQ ID NO. 192, SEQ ID NO. 193, SEQ ID NO. 194, SEQ ID NO. 195, SEQ ID NO. 196, SEQ ID NO. 197 or

a genetically engineered immune TCR KO-dCK KO CD123 CAR having any one of the sequence selected from SEQ ID NO. 34 to SEQ ID NO. 159, preferably from SEQ ID NO. 34, SEQ ID NO. 76, SEQ ID NO. 36, SEQ ID NO. 78; SEQ ID NO. 37, SEQ ID NO. 79, SEQ ID NO. 41, SEQ ID NO. 83, SEQ ID NO. 42, SEQ ID NO. 8), SEQ ID NO. 43, SEQ ID NO. 85, SEQ ID NO. 46, SEQ ID NO. 47, SEQ ID NO. 48, SEQ ID NO. 49, SEQ ID NO. 88, SEQ ID NO. 89, SEQ ID NO. 90, SEQ ID NO. 91, SEQ ID NO. 52, SEQ ID NO. 53, SEQ ID NO. 54, SEQ ID NO. 55, SEQ ID NO. 94, SEQ ID NO. 95, SEQ ID NO. 96 and SEQ ID NO. 97, T cells.

[0501] Preferably, the present invention provides a composition comprising a genetically engineered immune TCR KO-dCK KO-CD123 CAR having a sequence corresponding to SEQ ID NO. 31 T cells.

[0502] Preferably, the present invention provides a composition comprising a genetically engineered immune TCR KO-dCK KO-CD123 CAR having a sequence corresponding to SEQ ID NO. 32 T cells.

[0503] Preferably, the present invention provides a composition comprising a genetically engineered immune TCR KO-dCK KO-CD123 CAR having a sequence corresponding to SEQ ID NO. 160 T cells

[0504] Or any one of the sequence selected from SEQ ID NO. 160, SEQ ID NO. 188, SEQ ID NO. 189, SEQ ID NO. 190, SEQ ID NO. 191; SEQ ID NO. 192, SEQ ID NO. 193, SEQ ID NO. 194, SEQ ID NO. 195, SEQ ID NO. 196, SEQ ID NO. 197,

for its use or a method for treating a cancer such as BPDNL or as a treatment before bone marrow transplant. In one aspect, the disease is a hematologic cancer, in particular a stem cell cancer including but is not limited to leukemia (such as acute myelogenous leukemia (AML), chronic myelogenous leukemia, acute lymphoid leukemia, chronic lymphoid leukemia and myelodysplasia syndrome) and malignant lymphoproliferative conditions, including lymphoma (such as multiple myeloma, non-Hodgkin's lymphoma, Burkitt's lymphoma, and small cell- and large cell-follicular lymphoma), or a complication (relapse refractor AML), thereof.

[0505] The present invention also provides a composition as above for its use or a method for inhibiting the proliferation or reducing a CD123-expressing cell population or activity in a patient. An exemplary method includes contacting a population of cells comprising a CD123-expressing cell with a CD 123 CART cell of the invention that binds to the CD123-expressing cell.

[0506] In a more specific aspect, the present invention provides a composition for its use or a method for inhibiting the proliferation or reducing the population of cancer cells expressing CD 123 in a patient, the methods comprising contacting the CD123-expressing cancer cell population with a CD 123 CART cell of the invention that binds to the CD123-expressing cell, binding of a CD 123 CART cell of the invention to the CD123-expressing cancer cell resulting in the destruction of the CD123-expressing cancer cells

[0507] In certain aspects, the CD 123 CART cell of the invention reduces the quantity, number, amount or percentage of cells and/or cancer cells by at least 25%, at least 30%, at least 40%, at least 50%, at least 65%, at least 75%, at least 85%, at least 95%, or at least 99% (to undetectable level) in a subject with or animal model for myeloid leukemia or another cancer associated with CD123-expressing cells, relative to a negative control.

[0508] The present invention also provides a composition for its use or a method for preventing, treating and/or managing a disorder or condition associated with CD123-expressing cells (e.g., associated with a hematologic cancer), the methods comprising administering to a subject in need a CD 123 CART cell of the invention that binds to the CD123-expressing cell. In one aspect, the subject is a human. Non-limiting examples of disorders associated with CD123-expressing cells include autoimmune disorders (such as lupus), inflammatory disorders (such as allergies, IBD, and asthma) and cancers (such as hematological cancers, in particular AML or AML complications).

[0509] The present invention also provides a composition for its use or a method for preventing, treating and/or managing a disease associated with CD123-expressing cells, the method comprising administering to a subject in need a CD 123 CART cell of the invention that binds to the CD123-expressing cell. In one aspect, the subject is a human. Non-limiting examples of diseases associated with CD123-expressing cells include Acute Myeloid Leukemia (AML), myelodysplasia, B-cell Acute Lymphoid Leukemia, T-cell Acute Lymphoid Leukemia, hairy cell leukemia, blastic plasmacytoid dendritic cell neoplasm (BPDCN), chronic myeloid leukemia, Hodgkin lymphoma.

[0510] The present invention provides a composition for its use or a method for treating or preventing relapse of cancer associated with CD123-expressing cells, the method comprising administering to a subject in need thereof a CD 123 CART cell of the invention that binds to the CD 123-expressing cell. In another aspect, the methods comprise administering to the subject in need thereof an effective amount of a CD 123 CART cell of the invention that binds to the CD123-expressing cell in combination with an effective amount of another therapy.

[0511] In one aspect, CD 123 is considered to be a “cancer stem cell” marker in AML. Therefore, a CD 123 CART cell of the invention can prevent relapse of AML, or even treat AML that is mostly CD 123-negative but with a “stem” population of CD 123+ cells (a CD123-expressing cells).

[0512] In one aspect, the invention provides compositions and methods for treating subjects that have undergone treatment for a disease or disorder associated with elevated expression levels of CD 19, and exhibits a disease or disorder associated with elevated levels of CD123.

[0513] In one aspect, B-cell acute lymphoid leukemia (ALL) is an example of disease requiring a serial treatment using CART cells. For example, treatment with anti-CD 19 CAR T cells can sometimes result in CD19-negative relapse, which can be treated with anti-CD123 CAR T cells of the invention. Alternatively, the present invention includes dual targeting of B-ALL using CART cells comprising an anti-CD 19 CAR and an anti-CD 123 CAR.

[0514] The treatment with the engineered immune cells according to the invention may be in combination with one or more therapies against cancer selected from the group of antibodies therapy, chemotherapy, cytokines therapy, dendritic cell therapy, gene therapy, hormone therapy, laser light therapy and radiation therapy.

[0515] Preferably, the treatment with the engineered immune cells according to the invention may be administered in combination (e.g., before, simultaneously or following) with one or more therapies against cancer selected from Aracytine, Cytosine Arabinoside, amsacrine, Daunorubicine, Idarubicine, Novantrone, Mitoxantrone, Vepeside, Etoposide (VP16), arsenic trioxyde, transretinoic acid, combination of arsenic trioxyde, transretinoic acid, mechlorethamine, procarbazine, chlorambucil, and combination thereof.

[0516] According to a preferred embodiment of the invention, said treatment can be administrated into patients undergoing an immunosuppressive treatment. Indeed, the present invention preferably relies on cells or population of cells, which have been made resistant to at least one immunosuppressive agent due to the inactivation of a gene encoding a receptor for such immunosuppressive agent. In this aspect, the immunosuppressive treatment should help the selection and expansion of the T-cells according to the invention within the patient.

[0517] The administration of the cells or population of cells according to the present invention may be carried out in any convenient manner, including by aerosol inhalation, injection, ingestion, transfusion, implantation or transplantation. The compositions described herein may be administered to a patient subcutaneously, intradermaly, intratumorally, intranodally, intramedullary, intramuscularly, by intravenous or intralymphatic injection, or intraperitoneally. In one embodiment, the cell compositions of the present invention are preferably administered by intravenous injection.

[0518] The administration of the cells or population of cells can consist of the administration of from 10⁴-10⁹ cells per kg body weight, preferably 10⁵ to 10⁶ cells/kg body weight including all integer values of cell numbers within those ranges. The cells or population of cells can be administrated in one or more doses. In another embodiment, said effective amount of cells are administrated as a single dose. In another embodiment, said effective amount of cells are administrated as more than one dose over a period time. Timing of administration is within the judgment of managing physician and depends on the clinical condition of the patient. The cells or population of cells may be obtained from any source, such as a blood bank or a donor. While individual needs vary, determination of optimal ranges of effective amounts of a given cell type for a particular disease or conditions within the skill of the art. An effective amount means an amount which provides a therapeutic or prophylactic benefit. The dosage administrated will be dependent upon the age, health and weight of the recipient, kind of concurrent treatment, if any, frequency of treatment and the nature of the effect desired.

[0519] In another embodiment, said effective amount of cells or composition comprising those cells are administrated parenterally. Said administration can be an intravenous administration. Said administration can be directly done by injection within a tumor.

[0520] In certain embodiments of the present invention, cells are administered to a patient in conjunction with (e.g., before, simultaneously or following) any number of relevant treatment modalities, including but not limited to treatment with agents such as antiviral therapy, cidofovir and interleukin-2, Cytarabine (also known as ARA-C) or natalizimab treatment for MS patients or efaliztimab treatment for psoriasis patients or other treatments for PML patients. In further embodiments, the T cells of the invention may be used in combination with chemotherapy, radiation, immunosuppressive agents, such as cyclosporin, azathioprine, methotrexate, mycophenolate, and FK506, antibodies, or other immunoablative agents such as CAMPATH, anti-CD3 antibodies or other antibody therapies, cytoxin, fludaribine, cyclosporin, FK506, rapamycin, mycoplienolic acid, steroids, FR901228, cytokines, and irradiation. These drugs inhibit either the calcium dependent phosphatase calcineurin (cyclosporine and FK506) or inhibit the p70S6 kinase that is important for growth factor induced signaling (rapamycin) (Henderson, Naya et al. 1991; Liu, Albers et al. 1992; Bierer, Hollander et al. 1993). In a further embodiment, the cell compositions of the present invention are administered to a patient in conjunction with (e.g., before, simultaneously or following) bone marrow transplantation, T cell ablative therapy using either chemotherapy agents such as, fludarabine, external-beam radiation therapy (XRT), cyclophosphamide, or antibodies such as OKT3 or CAMPATH, In another embodiment, the cell compositions of the present invention are administered following B-cell ablative therapy such as agents that react with CD20, e.g., Rituxan. In that case, the CD123 CAR expressed in T cell of the invention does not consist in SEQ ID 160, unless it is administered before Rituxan.

[0521] For example, in one embodiment, subjects may undergo standard treatment with high dose chemotherapy followed by peripheral blood stem cell transplantation. In certain embodiments, following the transplant, subjects receive an infusion of the expanded immune cells of the present invention. In an additional embodiment, expanded cells are administered before or following surgery.

[0522] In certain embodiments of the present invention, anti-CD123 CAR expressing cells are administered to a patient in conjunction (e.g., before, simultaneously or following) with a drug selected from Aracytine, Cytosine Arabinoside, amsacrine, Daunorubicine, Idarubicine, Novantrone, Mitoxantrone, Vepeside, Etoposide (VP16), arsenic trioxyde, transretinoic acid, mechlorethamine, procarbazine, chlorambucil, and combination thereof. In these embodiments anti-CD123 CAR expressing cells may be resistant to the particular drug or combination of drugs that is (are) administered in conjunction with anti-CD123 CAR expressing cells.

[0523] In other embodiments of the present invention, anti-CD123 CAR expressing cells are administered to a patient in conjunction with a drug selected from cytarabine, anthracyclines, 6-thioguanine, hydroxyurea, prednisone, and combination thereof.

### Other Definitions

[0524] Unless otherwise specified, “a,” “an,” “the,” and “at least one” are used interchangeably and mean one or more than one. Amino acid residues in a polypeptide sequence are designated herein according to the one-letter code, in which, for example, Q means Gln or Glutamine residue, R means Arg or Arginine residue and D means Asp or Aspartic acid residue.

[0525] Amino acid substitution means the replacement of one amino acid residue with another, for instance the replacement of an Arginine residue with a Glutamine residue in a peptide sequence is an amino acid substitution.

[0526] Nucleotides are designated as follows: one-letter code is used for designating the base of a nucleoside: an is adenine, t is thymine, c is cytosine, and g is guanine. For the degenerated nucleotides, r represents g or a (purine nucleotides), k represents g or t, s represents g or c, w represents a or t, m represents a or c, y represents t or c (pyrimidine nucleotides), d represents g, a or t, v represents g, a or c, b represents g, t or c, h represents a, t or c, and n represents g, a, t or c.

[0527] “As used herein, “nucleic acid” or “polynucleotides” refers to nucleotides and/or polynucleotides, such as deoxyribonucleic acid (DNA) or ribonucleic acid (RNA), oligonucleotides, fragments generated by the polymerase chain reaction (PCR), and fragments generated by any of ligation, scission, endonuclease action, and exonuclease action. Nucleic acid molecules can be composed of monomers that are naturally-occurring nucleotides (such as DNA and RNA), or analogs of naturally-occurring nucleotides (e.g., enantiomeric forms of naturally-occurring nucleotides), or a combination of both. Modified nucleotides can have alterations in sugar moieties and/or in pyrimidine or purine base moieties. Sugar modifications include, for example, replacement of one or more hydroxyl groups with halogens, alkyl groups, amines, and azido groups, or sugars can be functionalized as ethers or esters. Moreover, the entire sugar moiety can be replaced with sterically and electronically similar structures, such as aza-sugars and carbocyclic sugar analogs. Examples of modifications in a base moiety include alkylated purines and pyrimidines, acylated purines or pyrimidines, or other well-known heterocyclic substitutes. Nucleic acid monomers can be linked by phosphodiester bonds or analogs of such linkages. Nucleic acids can be either single stranded or double stranded.

[0528] By chimeric antigen receptor (CAR) is intended molecules that combine a binding domain against a component present on the target cell, for example an antibody-based specificity for a desired antigen (e.g., tumor antigen) with a T cell receptor-activating intracellular domain to generate a chimeric protein that exhibits a specific anti-target cellular immune activity. Generally, CAR consists of an extracellular single chain antibody (scFv Fc) fused to the intracellular signaling domain of the T cell antigen receptor complex zeta chain (scFv Fc:ζ) and have the ability, when expressed in T cells, to redirect antigen recognition based on the monoclonal antibody's specificity. One example of CAR used in the present invention is a CAR directing against CD123 antigen and can comprise as non limiting example the amino acid sequences: SEQ ID NO: 23 to 48 and 160.

[0529] The term “endonuclease” refers to any wild-type or variant enzyme capable of catalyzing the hydrolysis (cleavage) of bonds between nucleic acids within a DNA or RNA molecule, preferably a DNA molecule. Endonucleases do not cleave the DNA or RNA molecule irrespective of its sequence, but recognize and cleave the DNA or RNA molecule at specific polynucleotide sequences, further referred to as “target sequences” or “target sites”. Endonucleases can be classified as rare-cutting endonucleases when having typically a polynucleotide recognition site greater than 12 base pairs (bp) in length, more preferably of 14-55 bp. Rare-cutting endonucleases significantly increase HR by inducing DNA double-strand breaks (DSBs) at a defined locus (Perrin, Buckle et al. 1993; Rouet, Smih et al. 1994; Choulika, Perrin et al. 1995; Pingoud and Silva 2007). Rare-cutting endonucleases can for example be a homing endonuclease (Paques and Duchateau 2007), a chimeric Zinc-Finger nuclease (ZFN) resulting from the fusion of engineered zinc-finger domains with the catalytic domain of a restriction enzyme such as Fokl (Porteus and Carroll 2005), a Cas9 endonuclease from CRISPR system (Gasiunas, Barrangou et al. 2012; Jinek, Chylinski et al. 2012; Cong, Ran et al. 2013; Mali, Yang et al. 2013) or a chemical endonuclease (Eisenschmidt, Lanio et al. 2005; Arimondo, Thomas et al. 2006). In chemical endonucleases, a chemical or peptidic cleaver is conjugated either to a polymer of nucleic acids or to another DNA recognizing a specific target sequence, thereby targeting the cleavage activity to a specific sequence. Chemical endonucleases also encompass synthetic nucleases like conjugates of orthophenanthroline, a DNA cleaving molecule, and triplex-forming oligonucleotides (TFOs), known to bind specific DNA sequences (Kalish and Glazer 2005). Such chemical endonucleases are comprised in the term “endonuclease” according to the present invention.

[0530] By a “TALE-nuclease” (TALEN) is intended a fusion protein consisting of a nucleic acid-binding domain typically derived from a Transcription Activator Like Effector (TALE) and one nuclease catalytic domain to cleave a nucleic acid target sequence. The catalytic domain is preferably a nuclease domain and more preferably a domain having endonuclease activity, like for instance I-Tevl, ColE7, NucA and Fok-I. In a particular embodiment, the TALE domain can be fused to a meganuclease like for instance I-Crel and 1-Onul or functional variant thereof. In a more preferred embodiment, said nuclease is a monomeric TALE-Nuclease. A monomeric TALE-Nuclease is a TALE-Nuclease that does not require dimerization for specific recognition and cleavage, such as the fusions of engineered TAL repeats with the catalytic domain of I-Tevl described in WO2012138927. Transcription Activator like Effector (TALE) are proteins from the bacterial species Xanthomonas comprise a plurality of repeated sequences, each repeat comprising di-residues in position 12 and 13 (RVD) that are specific to each nucleotide base of the nucleic acid targeted sequence. Binding domains with similar modular base-per-base nucleic acid binding properties (MBBBD) can also be derived from new modular proteins recently discovered by the applicant in a different bacterial species. The new modular proteins have the advantage of displaying more sequence variability than TAL repeats. Preferably, RVDs associated with recognition of the different nucleotides are HD for recognizing C, NG for recognizing T, NI for recognizing A, NN for recognizing G or A, NS for recognizing A, C, G or T, HG for recognizing T, IG for recognizing T, NK for recognizing G, HA for recognizing C, ND for recognizing C, HI for recognizing C, HN for recognizing G, NA for recognizing G, SN for recognizing G or A and YG for recognizing T, TL for recognizing A, VT for recognizing A or G and SW for recognizing A. In another embodiment, critical amino acids 12 and 13 can be mutated towards other amino acid residues in order to modulate their specificity towards nucleotides A, T, C and G and in particular to enhance this specificity. TALE-nuclease have been already described and used to stimulate gene targeting and gene modifications (Boch, Scholze et al. 2009; Moscou and Bogdanove 2009; Christian, Cermak et al. 2010; Li, Huang et al. 2011). Engineered TAL-nucleases are commercially available under the trade name TALEN™ (Cellectis, 8 rue de la Croix Jarry, 75013 Paris, France).

[0531] The rare-cutting endonuclease according to the present invention can also be a Cas9 endonuclease. Recently, a new genome engineering tool has been developed based on the RNA-guided Cas9 nuclease (Gasiunas, Barrangou et al. 2012; Jinek, Chylinski et al. 2012; Cong, Ran et al. 2013; Mali, Yang et al. 2013) from the type II prokaryotic CRISPR (Clustered Regularly Interspaced Short palindromic Repeats) adaptive immune system (see for review (Sorek, Lawrence et al. 2013)). The CRISPR Associated (Cas) system was first discovered in bacteria and functions as a defense against foreign DNA, either viral or plasmid. CRISPR-mediated genome engineering first proceeds by the selection of target sequence often flanked by a short sequence motif, referred as the proto-spacer adjacent motif (PAM). Following target sequence selection, a specific crRNA, complementary to this target sequence is engineered. Trans-activating crRNA (tracrRNA) required in the CRISPR type II systems paired to the crRNA and bound to the provided Cas9 protein. Cas9 acts as a molecular anchor facilitating the base pairing of tracRNA with cRNA (Deltcheva, Chylinski et al. 2011). In this ternary complex, the dual tracrRNA:crRNA structure acts as guide RNA that directs the endonuclease Cas9 to the cognate target sequence. Target recognition by the Cas9-tracrRNA:crRNA complex is initiated by scanning the target sequence for homology between the target sequence and the crRNA. In addition to the target sequence-crRNA complementarity, DNA targeting requires the presence of a short motif adjacent to the protospacer (protospacer adjacent motif—PAM). Following pairing between the dual-RNA and the target sequence, Cas9 subsequently introduces a blunt double strand break 3 bases upstream of the PAM motif (Garneau, Dupuis et al. 2010).

[0532] Rare-cutting endonuclease can be a homing endonuclease, also known under the name of meganuclease. Such homing endonucleases are well-known to the art (Stoddard 2005). Homing endonucleases recognize a DNA target sequence and generate a single- or double-strand break. Homing endonucleases are highly specific, recognizing DNA target sites ranging from 12 to 45 base pairs (bp) in length, usually ranging from 14 to 40 bp in length. The homing endonuclease according to the invention may for example correspond to a LAGLIDADG endonuclease, to a HNH endonuclease, or to a GIY-YIG endonuclease. Preferred homing endonuclease according to the present invention can be an I-Crel variant.

[0533] By “delivery vector” or “delivery vectors” is intended any delivery vector which can be used in the present invention to put into cell contact (i.e “contacting”) or deliver inside cells or subcellular compartments (i.e “introducing”) agents/chemicals and molecules (proteins or nucleic acids) needed in the present invention. It includes, but is not limited to liposomal delivery vectors, viral delivery vectors, drug delivery vectors, chemical carriers, polymeric carriers, lipoplexes, polyplexes, dendrimers, microbubbles (ultrasound contrast agents), nanoparticles, emulsions or other appropriate transfer vectors. These delivery vectors allow delivery of molecules, chemicals, macromolecules (genes, proteins), or other vectors such as plasmids, peptides developed by Diatos. In these cases, delivery vectors are molecule carriers. By “delivery vector” or “delivery vectors” is also intended delivery methods to perform transfection.

[0534] The terms “vector” or “vectors” refer to a nucleic acid molecule capable of transporting another nucleic acid to which it has been linked. A “vector” in the present invention includes, but is not limited to, a viral vector, a plasmid, a RNA vector or a linear or circular DNA or RNA molecule which may consists of a chromosomal, non chromosomal, semi-synthetic or synthetic nucleic acids. Preferred vectors are those capable of autonomous replication (episomal vector) and/or expression of nucleic acids to which they are linked (expression vectors). Large numbers of suitable vectors are known to those of skill in the art and commercially available.

[0535] Viral vectors include retrovirus, adenovirus, parvovirus (e. g. adenoassociated viruses), coronavirus, negative strand RNA viruses such as orthomyxovirus (e. g., influenza virus), rhabdovirus (e. g., rabies and vesicular stomatitis virus), paramyxovirus (e. g. measles and Sendai), positive strand RNA viruses such as picornavirus and alphavirus, and double-stranded DNA viruses including adenovirus, herpesvirus (e. g., Herpes Simplex virus types 1 and 2, Epstein-Barr virus, cytomegalovirus), and poxvirus (e. g., vaccinia, fowlpox and canarypox). Other viruses include Norwalk virus, togavirus, flavivirus, reoviruses, papovavirus, hepadnavirus, and hepatitis virus, for example. Examples of retroviruses include: avian leukosis-sarcoma, mammalian C-type, B-type viruses, D type viruses, HTLV-BLV group, lentivirus, spumavirus (Coffin, J. M., Retroviridae: The viruses and their replication, In Fundamental Virology, Third Edition, B. N. Fields, et al., Eds., Lippincott-Raven Publishers, Philadelphia, 1996).

[0536] By “lentiviral vector” is meant HIV-Based lentiviral vectors that are very promising for gene delivery because of their relatively large packaging capacity, reduced immunogenicity and their ability to stably transduce with high efficiency a large range of different cell types. Lentiviral vectors are usually generated following transient transfection of three (packaging, envelope and transfer) or more plasmids into producer cells. Like HIV, lentiviral vectors enter the target cell through the interaction of viral surface glycoproteins with receptors on the cell surface. On entry, the viral RNA undergoes reverse transcription, which is mediated by the viral reverse transcriptase complex. The product of reverse transcription is a double-stranded linear viral DNA, which is the substrate for viral integration in the DNA of infected cells. By “integrative lentiviral vectors (or LV)”, is meant such vectors as non limiting example, that are able to integrate the genome of a target cell. At the opposite by “non-integrative lentiviral vectors (or NILV)” is meant efficient gene delivery vectors that do not integrate the genome of a target cell through the action of the virus integrase.

[0537] Delivery vectors and vectors can be associated or combined with any cellular permeabilization techniques such as sonoporation or electroporation or derivatives of these techniques.

[0538] By cell or cells is intended any eukaryotic living cells, primary cells and cell lines derived from these organisms for in vitro cultures.

[0539] By “primary cell” or “primary cells” are intended cells taken directly from living tissue (i.e. biopsy material) and established for growth in vitro, that have undergone very few population doublings and are therefore more representative of the main functional components and characteristics of tissues from which they are derived from, in comparison to continuous tumorigenic or artificially immortalized cell lines.

[0540] As non-limiting examples cell lines can be selected from the group consisting of CHO-K1 cells; HEK293 cells; Caco2 cells; U2-OS cells; NIH 3T3 cells; NSO cells; SP2 cells; CHO-S cells; DG44 cells; K-562 cells, U-937 cells; MRC5 cells; IMR90 cells; Jurkat cells; HepG2 cells; HeLa cells; HT-1080 cells; HCT-116 cells; Hu-h7 cells; Huvec cells; Molt 4 cells.

[0541] All these cell lines can be modified by the method of the present invention to provide cell line models to produce, express, quantify, detect, study a gene or a protein of interest; these models can also be used to screen biologically active molecules of interest in research and production and various fields such as chemical, biofuels, therapeutics and agronomy as non-limiting examples.

[0542] by “mutation” is intended the substitution, deletion, insertion of up to one, two, three, four, five, six, seven, eight, nine, ten, eleven, twelve, thirteen, fourteen, fifteen, twenty, twenty five, thirty, forty, fifty, or more nucleotides/amino acids in a polynucleotide (cDNA, gene) or a polypeptide sequence. The mutation can affect the coding sequence of a gene or its regulatory sequence. It may also affect the structure of the genomic sequence or the structure/stability of the encoded mRNA.

[0543] by “variant(s)”, it is intended a repeat variant, a variant, a DNA binding variant, a TALE-nuclease variant, a polypeptide variant obtained by mutation or replacement of at least one residue in the amino acid sequence of the parent molecule.

[0544] by “functional variant” is intended a catalytically active mutant of a protein or a protein domain; such mutant may have the same activity compared to its parent protein or protein domain or additional properties, or higher or lower activity.

[0545] “identity” refers to sequence identity between two nucleic acid molecules or polypeptides. Identity can be determined by comparing a position in each sequence which may be aligned for purposes of comparison. When a position in the compared sequence is occupied by the same base, then the molecules are identical at that position. A degree of similarity or identity between nucleic acid or amino acid sequences is a function of the number of identical or matching nucleotides at positions shared by the nucleic acid sequences. Various alignment algorithms and/or programs may be used to calculate the identity between two sequences, including FASTA, or BLAST which are available as a part of the GCG sequence analysis package (University of Wisconsin, Madison, Wis.), and can be used with, e.g., default setting. For example, polypeptides having at least 70%, 85%, 90%, 95%, 98% or 99% identity to specific polypeptides described herein and preferably exhibiting substantially the same functions, as well as polynucleotide encoding such polypeptides, are contemplated.

[0546] “similarity” describes the relationship between the amino acid sequences of two or more polypeptides. BLASTP may also be used to identify an amino acid sequence having at least 70%, 75%, 80%, 85%, 87.5%, 90%, 92.5%, 95%, 97.5%, 98%, 99% sequence similarity to a reference amino acid sequence using a similarity matrix such as BLOSUM45, BLOSUM62 or BLOSUM80. Unless otherwise indicated a similarity score will be based on use of BLOSUM62. When BLASTP is used, the percent similarity is based on the BLASTP positives score and the percent sequence identity is based on the BLASTP identities score. BLASTP “Identities” shows the number and fraction of total residues in the high scoring sequence pairs which are identical; and BLASTP “Positives” shows the number and fraction of residues for which the alignment scores have positive values and which are similar to each other. Amino acid sequences having these degrees of identity or similarity or any intermediate degree of identity of similarity to the amino acid sequences disclosed herein are contemplated and encompassed by this disclosure. The polynucleotide sequences of similar polypeptides are deduced using the genetic code and may be obtained by conventional means. For example, a functional variant of pTalpha can have 70%, 75%, 80%, 85%, 87.5%, 90%, 92.5%, 95%, 97.5%, 98%, 99% sequence similarity to the amino acid sequence of SEQ ID NO: 107. A polynucleotide encoding such a functional variant would be produced by reverse translating its amino acid sequence using the genetic code.

[0547] “signal-transducing domain” or “co-stimulatory ligand” refers to a molecule on an antigen presenting cell that specifically binds a cognate co-stimulatory molecule on a T-cell, thereby providing a signal which, in addition to the primary signal provided by, for instance, binding of a TCR/CD3 complex with an MHC molecule loaded with peptide, mediates a T cell response, including, but not limited to, proliferation activation, differentiation and the like. A co-stimulatory ligand can include but is not limited to CD7, B7-1 (CD80), B7-2 (CD86), PD-L1, PD-L2, 4-1BBL, OX40L, inducible costimulatory ligand (ICOS-L), intercellular adhesion molecule (ICAM, CD30L, CD40, CD70, CD83, HLA-G, MICA, M1CB, HVEM, lymphotoxin beta receptor, 3/TR6, ILT3, ILT4, an agonist or antibody that binds Toll ligand receptor and a ligand that specifically binds with B7-H3. A co-stimulatory ligand also encompasses, inter alia, an antibody that specifically binds with a co-stimulatory molecule present on a T cell, such as but not limited to, CD27, CD28, 4-IBB, OX40, CD30, CD40, PD-1, ICOS, lymphocyte function-associated antigen-1 (LFA-1), CD2, CD7, LIGHT, NKG2C, B7-H3, a ligand that specifically binds with CD83.

[0548] A “co-stimulatory molecule” refers to the cognate binding partner on a T cell that specifically binds with a co-stimulatory ligand, thereby mediating a co-stimulatory response by the cell, such as, but not limited to proliferation. Co-stimulatory molecules include, but are not limited to an MHC class I molecule, BTLA and Toll ligand receptor.

[0549] A “co-stimulatory signal” as used herein refers to a signal, which in combination with primary signal, such as TCR/CD3 ligation, leads to T cell proliferation and/or upregulation or downregulation of key molecules.

[0550] The term “extracellular ligand-binding domain” as used herein is defined as an oligo- or polypeptide that is capable of binding a ligand. Preferably, the domain will be capable of interacting with a cell surface molecule. For example, the extracellular ligand-binding domain may be chosen to recognize a ligand that acts as a cell surface marker on target cells associated with a particular disease state. Thus examples of cell surface markers that may act as ligands include those associated with viral, bacterial and parasitic infections, autoimmune disease and cancer cells.

[0551] The term “subject” or “patient” as used herein includes all members of the animal kingdom including non-human primates and humans.

[0552] The term “relapsed” refers to a situation where a subject or a mammal, who has had a remission of cancer after therapy has a return of cancer cells.

[0553] The term “refractory or resistant” refers to a circumstance where a subject or a mammal, even after intensive treatment, has residual cancer cells in his body.

[0554] The term “drug resistance” refers to the condition when a disease does not respond to the treatment of a drug or drugs. Drug resistance can be either intrinsic (or primary resistance), which means the disease has never been responsive to the drug or drugs, or it can be acquired, which means the disease ceases responding to a drug or drugs that the disease had previously responded to (secondary resistance). In certain embodiments, drug resistance is intrinsic. In certain embodiments, the drug resistance is acquired.

[0555] The term “hematologic malignancy” or “hematologic cancer” refers to a cancer of the body's blood-bone marrow and/or lymphatic tissue. Examples of hematological malignancies include, for instance, myelodysplasia, leukemia, lymphomas, such as cutaneous Lymphomas, non-Hodgkin's lymphoma, Hodgkin's disease (also called Hodgkin's lymphoma), and myeloma, such as acute lymphocytic leukemia (ALL), acute myeloid leukemia (AML), acute promyelocytic leukemia (APL), chronic lymphocytic leukemia (CLL), chronic myeloid leukemia (CML), chronic neutrophilic leukemia (CNL), acute undifferentiated leukemia (AUL), anaplastic large-cell lymphoma (ALCL), prolymphocytic leukemia (PML), juvenile myelomonocyctic leukemia (JMML), adult T-cell ALL, AML with trilineage myelodysplasia (AML/TMDS), mixed lineage leukemia (MLL), myelodysplastic syndromes (MDSs), myeloproliferative disorders (MPD), and multiple myeloma (MM).

[0556] The term “leukemia” refers to malignant neoplasms of the blood-forming tissues, including, but not limited to, chronic lymphocytic leukemia or chronic lymphoid leukemia, chronic myelocytic leukemia, or chronic myelogenous leukemia, acute lymphoblastic leukemia, acute myeloid leukemia or acute myelogenous leukemia (AML) and acute myeloblastic leukemia.

[0557] In general, a primary cell is a cell isolated from a blood sample or a biopsy and then optionally further cultured in vitro. A cell line is a cellular culture of a transformed ie cancerous cell, preferably a homogenous cellular culture of a transformed ie cancerous cell (wherein a marker is represented by a Gaussian curve).

[0558] The above written description of the invention provides a manner and process of making and using it such that any person skilled in this art is enabled to make and use the same, this enablement being provided in particular for the subject matter of the appended claims, which make up a part of the original description.

[0559] Where a numerical limit or range is stated herein, the endpoints are included. Also, all values and subranges within a numerical limit or range are specifically included as if explicitly written out.

[0560] The above description is presented to enable a person skilled in the art to make and use the invention, and is provided in the context of a particular application and its requirements. Various modifications to the preferred embodiments will be readily apparent to those skilled in the art, and the generic principles defined herein may be applied to other embodiments and applications without departing from the spirit and scope of the invention. Thus, this invention is not intended to be limited to the embodiments shown, but is to be accorded the widest scope consistent with the principles and features disclosed herein.

[0561] Having generally described this invention, a further understanding can be obtained by reference to certain specific examples, which are provided herein for purposes of illustration only, and are not intended to be limiting unless otherwise specified.

### General Method

[0562] In general, the CD123 CAR T cells of the invention were prepared using T cells purified from Buffy coat samples from different donors. The process and products satisfies the requirement of the Good Manufacturing Practices (FDA 21 CFR and EU GMP).

[0563] The clinical essay was conducted under Good Clinical Practices (UK GCP or USA GCP)
[0564] Blood 2014; 124(21):4689

### Preclinical Study

[0565] Primary T-Cell Cultures

[0566] T cells were purified from Buffy coat samples provided by EFS (Etablissement Français du Sang, Paris, France) using Ficoll gradient density medium. The PBMC layer was recovered and T cells were purified using a commercially available T-cell enrichment kit. Purified T cells were activated in X-Vivo™-15 medium (Lonza) supplemented with 20 ng/mL Human IL-2, 5% Human, and Dynabeads Human T activator CD3/CD28 at a bead:cell ratio 1:1 (Life Technologies).

[0567] CAR mRNA Transfection

[0568] Transfections were done at Day 4 or Day 11 after T-cell purification and activation. 5 millions of cells were transfected with 15 μg of mRNA encoding the different CAR constructs. CAR mRNAs were produced using T7 mRNA polymerase transfections done using Cytopulse technology, by applying two 0.1 mS pulses at 3000V/cm followed by four 0.2 mS pulses at 325V/cm in 0.4 cm gap cuvettes in a final volume of 200 μl of “Cytoporation buffer T” (BTX Harvard Apparatus). Cells were immediately diluted in X-Vivo™-15 media and incubated at 37° C. with 5% CO₂. IL-2 was added 2 h after electroporation at 20 ng/mL.

### T-Cell Transduction

[0569] Transduction of T-cells with recombinant lentiviral vectors expression the CAR was carried out three days after T-cell purification/activation. Lentiviral vectors were produced by Vectalys SA (Toulouse, France) by transfection of genomic and helper plasmids in HEK-293 cells. Transductions were carried out at a multiplicity of infection of 5, using 10⁶ cells per transduction. CAR detection at the surface of T-cells was done using a recombinant protein consisting on the fusion of the extracellular domain of the human CD123 protein together with a murine IgG1 Fc fragment (produced by LakePharma). Binding of this protein to the CAR molecule was detected with a PE-conjugated secondary antibody (Jackson Immunoresearch) targeting the mouse Fc portion of the protein, and analyzed by flow cytometry.

[0570] Degranulation Assay (CD107a Mobilization)

[0571] T-cells were incubated in 96-well plates (40,000 cells/well), together with an equal amount of cells expressing various levels of the CD123 protein. Co-cultures were maintained in a final volume of 100 μl of X-Vivo™-15 medium (Lonza) for 6 hours at 37° C. with 5% CO₂. CD107a staining was done during cell stimulation, by the addition of a fluorescent anti-CD107a antibody at the beginning of the co-culture, together with 1 μg/ml of anti-CD49d, 1 μg/ml of anti-CD28, and 1× Monensin solution. After the 6 h incubation period, cells were stained with a fixable viability dye and fluorochrome-conjugated anti-CD8 and analyzed by flow cytometry. The degranulation activity was determined as the % of CD8+/CD107a+ cells, and by determining the mean fluorescence intensity signal (MFI) for CD107a staining among CD8+ cells. Degranulation assays were carried out 24 h after mRNA transfection.

[0572] IFN Gamma Release Assay

[0573] T-cells were incubated in 96-well plates (40,000 cells/well), together with cell lines expressing various levels of the CD123 protein. Co-cultures were maintained in a final volume of 100 μl of X-Vivo™-15 medium (Lonza) for 24 hours at 37° C. with 5% CO₂. After this incubation period the plates were centrifuged at 1500 rpm for 5 minutes and the supernatants were recovered in a new plate. IFN gamma detection in the cell culture supernatants was done by ELISA assay. The IFN gamma release assays were carried by starting the cell co-cultures 24 h after mRNA transfection.

[0574] Cytotoxicity Assay

[0575] T-cells were incubated in 96-well plates (100,000 cells/well), together with 10,000 target cells (expressing CD123) and 10,000 control (CD123neg) cells in the same well. Target and control cells were labelled with fluorescent intracellular dyes (CFSE or Cell Trace Violet) before co-culturing them with CAR+ T-cells. The co-cultures were incubated for 4 hours at 37′C with 5% CO₂. After this incubation period, cells were labelled with a fixable viability dye and analyzed by flow cytometry. Viability of each cellular population (target cells or CD123neg control cells) was determined and the % of specific cell lysis was calculated. Cytotoxicity assays were carried out 48 h after mRNA transfection.

[0576] T-Cell Transduction

[0577] Transduction of T-cells with recombinant lentiviral vectors expression the CAR was carried out three days after T-cell purification/activation. CAR detection at the surface of T-cells was done using a recombinant protein consisting on the fusion of the extracellular domain of the human CD123 protein, together with a murine IgG1 Fc fragment. Binding of this protein to the CAR molecule was detected with a fluorochrome-conjugated secondary antibody targeting the mouse Fc portion of the protein, and analyzed by flow cytometry.

[0578] Anti-Tumor Mouse Model

[0579] Immuno-deficient NOG mice were intravenously (iv) injected with (CD123 expressing_MOLM13-Luciferase cells as an AML xenograft mouse model. Optionally, mice received an anti-cancer treatment that is PNA or FLAG. Mice were then iv injected (either 2 or 7 days after injection of the tumor cell line) with different doses of CAR+ T-cells to be tested, or with T-cells that were not transduced with the CAR lentiviral vector. Bioluminescent signals were determined at the day of T-cell injection (DO), at D7, 14, 21, 28 and 40 after T-cell injection in order to follow tumoral progression on the different animals.

### Clinical Study

[0580] A Phase I dose escalation trial is designed to evaluate the safety and the biologic efficacy of allogeneic TCR KO specific cytotoxic T-lymphocytes (CTL) genetically modified to express artificial T-cell receptors (CAR) targeting the CD123 molecule (CD123CAR) in patients who have relapsed/refractory Acute myeloid Leukemia (AML), blastic plasmacytoid dendritic cell neoplasm, bridge to transplant.

[0581] Each patient will receive at least one dose of donor derived, genetically modified CTL and will be monitored for toxicity and detection of transduced CTL as well as disease specific markers.

[0582] Any of the following may vary individually upon medical indication.

| Condition | Intervention | Phase |
|---|---|---|
| Acute myeloid Leukemia | Biological: | Phase 1 |
| Blastic plasmacytoid dendritic | Biological/Genetically | |
| cell neoplasm | Modified T cells | |
| Bridge to transplant | | |

[0583] Study Type: Interventional
[0584] Study Design: Endpoint Classification: Safety/Efficacy Study
   [0585] Intervention Model: Single Group Assignment
   [0586] Masking: Open Label
   [0587] Primary Purpose: Treatment
[0588] Official Title: A Phase I Dose Escalation Trial Using In Vitro Expanded Allogeneic Cytotoxic T-Lymphocytes (CTLs) Genetically Targeted to the B-Cell Specific Antigen CD123 Positive Residual Or Relapsed Acute myeloid Leukemia, Blastic plasmacytoid dendritic cell neoplasm, during Bridge to transplant.
   Key words Acute myeloid Leukemia, Blastic plasmacytoid dendritic cell neoplasm, Bridge to transplant

### Primary Outcome Measures:

[0589] Evaluate the safety/persistence of escalating doses of allogeneic specific CTL modified to express artificial T cell receptors targeting CD123 molecule given for persistence or relapse of AML, for Blastic plasmacytoid dendritic cell neoplasm or in a Bridge to transplant.

### Secondary Outcome Measures:

[0590] To assess the effects of the adoptively transferred CD123 specific T-cells on the progression of AML.
[0591] To quantitate the number of CD123 chimeric antigen receptor (CD123 CAR) positive T-cells in the blood at defined intervals post infusion in order to determine their survival and proliferation in the host

[0592] To quantitate the number of CD123 chimeric antigen receptor (CD123 CAR) positive T-cells in the blood at defined intervals post infusion of Rituximab (375 mg/m2)

| Arms | Assigned interventions |
|---|---|
| Experimental: Biological/ | Biological: Biological/Genetically |
| Genetically Modified T cells | Modified T cells |
| Patients with persistent minimal | Following completion of the |
| residual disease (+MRD) or | chemotherapy, genetically |
| relapsed AML will receive a | modified T cells will be given |
| conditioning chemotherapy | intravenously at one of 3 dose |
| regimen followed by intravenous | levels (10⁵, 10⁶ and 10⁷). After the |
| infusion of allogeneic specific | infusion patients will be monitored |
| cytotoxic T-cells (CTLs) | clinically and with serial blood and |
| genetically modified ex vivo to | marrow evaluations to assess |
| express the CD123-specific | toxicity, therapeutic effects, and |
| chimeric artificial T-cell receptor. | the in-vivo survival of the |
| | genetically modified T-cells. |

### Eligibility

### Genders Eligible for Study: Both

### Accepts Healthy Volunteers: No

### Criteria

### Inclusion Criteria:

[0593] History of CD123+ leukemia with evidence of bone marrow relapse or persistent.
[0594] Persistent minimal residual disease must be demonstrated by morphology, FISH, flow cytometry or RT-PCR with at least 2 sequential testings separated by at least 1 week.
[0595] No age restriction for patients
[0596] KPS or Lansky score> or = to 40
[0597] Renal function (measured prior to conditioning chemotherapy)
[0598] Hepatic function (measured prior to conditioning chemotherapy):
[0599] AST≦5× the institutional ULN Elevation secondary to leukemic involvement is not an exclusion criterion. Leukemic involvement will be determined by the presence of progressive relapse defined by escalating bone marrow or peripheral blood leukemia blasts within the previous month and the absence of initiation of know hepatotoxic medication (e.g. azoles).
[0600] Total bilirubin≦2.5× the institutional ULN
[0601] Adequate cardiac function (e.g. LVEF≧40%) as assessed by ECHO or MUGA or other similar cardia imaging performed within 1 month of enrollment.
[0602] Pulmonary function (measured prior to conditioning chemotherapy):
[0603] Oxygen saturation≧90% on room air

### Donor Eligibility:

[0604] The donor, including a third party donor, must consent to a leukapheresis or whole blood donation(s) obtained at one or more phlebotomies which, in aggregate, will total approximately 250 ml for adults and no more than 5 ml/kg per draw from pediatric donors.
[0605] Related donors<18 years of age requiring placement of a leukapheresis catheter will donate peripheral blood collected by phlebotomy (including a unit of blood if weight permits) and shall not undergo catheter placement for leukapheresis as this is considered above minimal risk to the donor.
[0606] There is no upper age limit for a donor. However, the minimum age for a related donor is 7 years as this is the youngest age a person can be considered capable of giving assent to participate in a research study.
[0607] Donor's high resolution HLA typing must be available for review
[0608] CBC within one week of donation. Results of tests must be within a range that would not preclude donating blood or undergoing leukapheresis.
[0609] Serologic testing for transmissible diseases will be performed as per institutional guidelines adopted from extant NMDP and FACT guidelines. Donors should be considered eligible to donate leukapheresis or blood based on these guidelines (i.e. blood donation guidelines)

### Exclusion Criteria:

[0610] Patients with active HIV, hepatitis B or hepatitis C infection.
[0611] Patients with any concurrent active malignancies as defined by malignancies requiring any therapy other than expectant observation.
[0612] Females who are pregnant.
[0613] Patients will be excluded if they have isolated extra-medullary relapse of ALL.
[0614] Patients with active (grade 2-4) acute graft versus host disease (GVHD), chronic GVHD or an overt autoimmune disease (e.g. hemolytic anemia) requiring glucocorticosteroid treatment (>0.5 mg/kg/day prednisone or its equivalent) as treatment
[0615] Active central nervous system (CNS) leukemia, as defined by unequivocal morphologic evidence of lymphoblasts in the cerebrospinal fluid (CSF) or symptomatic CNS leukemia (i.e. cranial nerve palsies or other significant neurologic dysfunction) within 28 days of treatment. Prophylactic intrathecal medication is not a reason for exclusion.
[0616] Adult patients (≧18 years old) with the following cardiac conditions will be excluded:
[0617] New York Heart Association (NYHA) stage III or IV congestive heart failure
[0618] Myocardial infarction≦6 months prior to enrollment
[0619] History of clinically significant ventricular arrhythmia or unexplained syncope, not believed to be vasovagal in nature or due to dehydration.
[0620] History of severe non-ischemic cardiomyopathy with EF≦20%

[0621] The first data demonstrate that the engineered T cell of the invention can be infused iv at a dose of 10⁷ cells/kg to relapse refractory AML patients and selectively clear CD123-expressing cancerous cells for at least 11 months.

### EXAMPLES

### Example 1: Proliferation of TCRalpha Inactivated Cells Expressing a CD123-CAR

[0622] Heterodimeric TALE-nuclease targeting two 17-bp long sequences (called half targets) separated by an 15-bp spacer within T-cell receptor alpha constant chain region (TRAC) gene were designed and produced. Each half target is recognized by repeats of the half TALE-nucleases listed in Table 10.

TABLE 10
TAL-nucleases targeting TCRalpha gene

| Target | Target sequence | Repeat sequence | Half TALE-nuclease |
|---|---|---|---|
| TRAC_T01 | TTGTCCCACAGATATCC | Repeat TRAC_T01-L | TRAC_T01-L TALEN |
| | Agaaccctgaccctg | (SEQ ID NO: 14) | (SEQ ID NO: 16) |
| | CCGTGTACCAGCTGAGA | Repeat TRAC_T01-R | TRAC_T01-R TALEN |
| | (SEQ ID NO: 13) | (SEQ ID NO: 15) | (SEQ ID NO: 17) |

[0623] Each TALE-nuclease construct was subcloned using restriction enzyme digestion in a mammalian expression vector under the control of the T7 promoter. mRNA encoding TALE-nuclease cleaving TRAC genomic sequence were synthesized from plasmid carrying the coding sequence downstream from the T7 promoter.

[0624] Purified T cells preactivated during 72 hours with antiCD3/CD28 coated beads were transfected with each of the 2 mRNAs encoding both half TRAC_T01 TALE-nucleases. 48 hours post-transfection, different groups of T cells from the same donor were respectively transduced with a lentiviral vector encoding one of the CD-123 CAR previously described (SEQ ID NO: 23 to 48). 2 days post-transduction, CD3_{NEG} cells were purified using anti-CD3 magnetic beads and 5 days post-transduction cells were reactivated with soluble anti-CD28 (5 μg/ml).

[0625] Cell proliferation was followed for up to 30 days after reactivation by counting cell 2 times per week. Increased proliferation in TCR alpha inactivated cells expressing the CD-123 CARs, especially when reactivated with anti-CD28, was observed compared to non-transduced cells.

[0626] To investigate whether the human T cells expressing the CD123-CAR display activated state, the expression of the activation marker CD25 are analyzed by FACS 7 days post transduction. The purified cells transduced with the lentiviral vector encoding CD-123 CAR assayed for CD25 expression at their surface in order to assess their activation in comparison with the non-transduced cells. Increased CD25 expression is expected both in CD28 reactivation or no reactivation conditions.

### Example 2

[0627] Construction of CD123 CAR Using Anti-CD123 scFv Antibody Fragments Derived from Klon43, Functional Analysis in TCR KO and dCK KO TCR CD123 Expressing Cells

[0628] An scFv from Klon 43 or humanized scFv was prepared using a combination of a VH (SEQ ID NO 12, a L (SEQ ID NO 10), a VL SEQ ID NO 11, or a VH selected from SEQ ID NO 24 to SEQ ID NO. 30 a linker L and a VL selected from SEQ ID NO. 18 to SEQ ID NO. 23, respectively was used to generate CD123 Chimeric Antigen Receptors (CD123 CARs of the invention) and to screen them to select performant (with anti-tumoral activity with the less side effects).

[0629] Architectures V1 or V3, preferably V3 were used (FIG. 2 and FIG. 3) and activity was determined upon expression in human T-cells (FIG. 4, FIG. 5, FIG. 6 and FIG. 7).

[0630] The results illustrated in FIG. 4 shows degranulation activity of different a scFv according to the invention for one architecture (v3: CD8-hinge/CD8-transmembrane), when CAR+ T-cells were co-cultured for 6 hours with CD123 expressing cells (RPM18226), or with cells that do not express CD123 (K562). White bars correspond to degranulation signals observed in T-cells that were cultured alone, black bars represent the signals observed when T-cells were co-cultured with RPM18226 cells, and gray bars show degranulation signals of T-cells co-cultured with K562 cells.

[0631] FIG. 5 shows the amount of IFN gamma released by T-cells when co-cultured for 24 h with cells expressing different levels of CD123 (KG1a or RPM18226), or with cells that do not express CD123 (K562). IFN gamma release from T-cells cultured alone, in the same conditions that the co-cultures, is also shown. The experiments were done for three independent donors, and results from a representative donor are shown here.

[0632] FIGS. 6 and 7 show a dose-response of the specific cytolytic activity of CAR-T cells in vivo in mice treated with PNA (20 mg/kg) ip.

[0633] Immunodefficient mice were injected with MOLM13-Luciferase cells 2 days before injection of non-transduced human T-cells, or with different doses of anti-CD123 CAR+ T-cells. The results represent the bioluminescent signal observed at different time points after T-cell injection.

### Example 3: Clinical Study

[0634] Clinical study provided data demonstrating the feasibility of the clinical study described herein.

[0635] At least one patient suffering refractory/relapsed AML received a treatment according to the invention that significantly increased her life expectancy by more than 16 months and reduced the cancerous cells below detection level for at least 6 months.

[0636] Engineered immune cells expressing the CD123 were detected at least 3 months after infusion.

### Administration of Rituximab (Rituxan®).

[0637] The total dose of Rituximab administered by intravenous route during 4 day after an initial rituximab dose of 375 mg/m2 was 2,250 mg/m2.

[0638] Premedication was performed before each infusion with acetaminophen and an antihistamine.

[0639] In another embodiment, the first Infusion was initiated at a rate of 50 mg/hr. In the absence of infusion toxicity, infusion rate was 50 mg/hr incremented every 30 minutes, to a maximum of 400 mg/hr.

[0640] For the subsequent Infusions, it was performed at a rate of 100 mg/hr. In the absence of infusion toxicity, increased to a maximum of 400 mg/hr to reach 2,250 mg/m2.

[0641] The results show that the level of CD123 CAR cells in the blood of patients was below detection at 24 h after the last infusion.

Klo43-1
(SEQ ID NO. 31)

[chemical structure]

ISSFFPPGYQIYIWAPLAGTCGVLLLSLVITLYCKRGRKKLLYIFKQP
FMRPVQTTQEEDGCSCRFPEEEEGGCELRVKFSRSADAPAYQQGQNQL
YNELNLGRREEYDVLDKRRGRDPEMGGKPRRKNPQEGLYNELQKDKMA
EAYSEIGMKGERRRGKGHDGLYQGLSTATKDTYDALHMQALPPR

[0642] In one embodiment Klon43-1 is

[chemical structure]

PLAGTCGVLLLSLVITLYCKRGRKKLLYIFKQPFMRPVQTTQEEDGCS
CRFPEEEEGGCELRVKFSRSADAPAYQQGQNQLYNELNLGRREEYDVL
DKRRGRDPEMGGKPRRKNPQEGLYNELQKDKMAEAYSEIGMKGERRRG
KGHDGLYQGLSTATKDTYDALHMQALPPR
Klo43-3
(SEQ ID NO. 32)

[chemical structure]

QPLSLRPEACRPAAGGAVHTRGLDFACDIYIWAPLAGTCGVLLLSLVI
TLYCKRGRKKLLYIFKQPFMRPVQTTQEEDGCSCRFPEEEEGGCELRV
KFSRSADAPAYQQGQNQLYNELNLGRREEYDVLDKRRGRDPEMGGKPR
RKNPQEGLYNELQKDKMAEAYSEIGMKGERRRGKGHDGLYQGLSTATK
DTYDALHMQALPPR

[0643] In one embodiment Klon43-3 is

[chemical structure]

LRPEACRPAAGGAVHTRGLDFACDIYIWAPLAGTCGVLLLSLVITLYC
KRGRKKLLYIFKQPFMRPVQTTQEEDGCSCRFPEEEEGGCELRVKFSR
SADAPAYQQGQNQLYNELNLGRREEYDVLDKRRGRDPEMGGKPRRKNP
QEGLYNELQKDKMAEAYSEIGMKGERRRGKGHDGLYQGLSTATKDTYD
ALHMQALPPR
Klo43-5
(SEQ ID NO. 33)

[chemical structure]

VAGPSVFLFPPKPKDTLMIARTPEVTCVVVDVSHEDPEVKFNWYVDGV
EVHNAKTKPREEQYNSTYRVVSVLTVLHQDWLNGKEYKCKVSNKALPA
PIEKTISKAKGQPREPQVYTLPPSRDELTKNQVSLTCLVKGFYPSDIA
VEWESNGQPENNYKTTPPVLDSDGSFFLYSKLTVDKSRWQQGNVFSCS
VMHEALHNHYTQKSLSLSPGKIYIWAPLAGTCGVLLLSLVITLYCKRG
RKKLLYIFKQPFMRPVQTTQEEDGCSCRFPEEEEGGCELRVKFSRSAD
APAYQQGQNQLYNELNLGRREEYDVLDKRRGRDPEMGGKPRRKNPQEG
LYNELQKDKMAEAYSEIGMKGERRRGKGHDGLYQGLSTATKDTYDALH
MQALPPR

[0644] In one embodiment Klon43-5 is

[chemical structure]

SVFLFPPKPKDTLMIARTPEVTCVVVDVSHEDPEVKFNWYVDGVEV
HNAKTKPREEQYNSTYRVVSVLTVLHQDWLNGKEYKCKVSNKALPA
PIEKTISKAKGQPREPQVYTLPPSRDELTKNQVSLTCLVKGFYPSD
IAVEWESNGQPENNYKTTPPVLDSDGSFFLYSKLTVDKSRWQQGNV
FSCSVMHEALHNHYTQKSLSLSPGKIYIWAPLAGTCGVLLLSLVIT
LYCKRGRKKLLYIFKQPFMRPVQTTQEEDGCSCRFPEEEEGGCELR
VKFSRSADAPAYQQGQNQLYNELNLGRREEYDVLDKRRGRDPEMGG
KPRRKNPQEGLYNELQKDKMAEAYSEIGMKGERRRGKGHDGLYQGL
STATKDTYDALHMQALPPR

[0645] The Humanized CD123 CAR of the invention comprise one of the following sequences:

Version 1 VH1
VL1
MALPVTALLLPLALLLHAARPEVKLVESGGGLVQPGRSLRLSCTASGFTFTDYYMSWVRQAPGKGLE
WVGLIRSKADGYTTEYSASVKGRFTISRDDSKSILYLQMNSLKTEDTAVYYCARDAAYYSYYSPEGAMD
YWGQGTLVTVSSGGGGSGGGGSGGGGSMADYKDIVMTQSPSSVSASVGDRVTITCRASQNVDSAV
AWYQQKPGKAPKALIYSASYRYSGVPSRFSGRGSGTDFTLTISSLQPEDFATYYCQQYYSTPWTFGQGT
KVEIKRGLAVSTISSFFPPGYQIYIWAPLAGTCGVLLLSLVITLYCKRGRKKLLYIFKQPFMRPVQTTQEED
GCSCRFPEEEEGGCELRVKFSRSADAPAYQQGQNQLYNELNLGRREEYDVLDKRRGRDPEMGGKPR
RKNPQEGLYNELQKDKMAEAYSEIGMKGERRRGKGHDGLYQGLSTATKDTYDALHMQALPPR
VL2
MALPVTALLLPLALLLHAARPEVKLVESGGGLVQPGRSLRLSCTASGFTFTDYYMSWVRQAPGKGLE
WVGLIRSKADGYTTEYSASVKGRFTISRDDSKSILYLQMNSLKTEDTAVYYCARDAAYYSYYSPEGAMD
YWGQGTLVTVSSGGGGSGGGGSGGGGSMADYKDIQMTQSPSSVSASVGDRVTITCRASQNVDSAV
AWYQQKPGKAPKALIYSASYRYSGVPSRFSGRGSGTDFTLTISSLQPEDFATYYCQQYYSTPWTFGQGT
KVEIKRGLAVSTISSFFPPGYQIYIWAPLAGTCGVLLLSLVITLYCKRGRKKLLYIFKQPFMRPVQTTQEED
GCSCRFPEEEEGGCELRVKFSRSADAPAYQQGQNQLYNELNLGRREEYDVLDKRRGRDPEMGGKPR
RKNPQEGLYNELQKDKMAEAYSEIGMKGERRRGKGHDGLYQGLSTATKDTYDALHMQALPPR
VL3
MALPVTALLLPLALLLHAARPEVKLVESGGGLVQPGRSLRLSCTASGFTFTDYYMSWVRQAPGKGLE
WVGLIRSKADGYTTEYSASVKGRFTISRDDSKSILYLQMNSLKTEDTAVYYCARDAAYYSYYSPEGAMD
YWGQGTLVTVSSGGGGSGGGGSGGGGSMADYKDIQMTQSPSSVSASVGDRVTITCRASQNVDSAV
AWYQQKPGKAPKALIYSASYRYSGVPSRFSGSGSGTDFTLTISSLQPEDFATYYCQQYYSTPWTFGQGT
KVEIKRGLAVSTISSFFPPGYQIYIWAPLAGTCGVLLLSLVITLYCKRGRKKLLYIFKQPFMRPVQTTQEED
GCSCRFPEEEEGGCELRVKFSRSADAPAYQQGQNQLYNELNLGRREEYDVLDKRRGRDPEMGGKPR
RKNPQEGLYNELQKDKMAEAYSEIGMKGERRRGKGHDGLYQGLSTATKDTYDALHMQALPPR
VL4
MALPVTALLLPLALLLHAARPEVKLVESGGGLVQPGRSLRLSCTASGFTFTDYYMSWVRQAPGKGLE
WVGLIRSKADGYTTEYSASVKGRFTISRDDSKSILYLQMNSLKTEDTAVYYCARDAAYYSYYSPEGAMD
YWGQGTLVTVSSGGGGSGGGGSGGGGSMADYKDIQMTQSPSSVSASVGDRVTITCRASQNVDSAV
AWYQQKPGKAPKLLIYSASYRYSGVPSRFSGSGSGTDFTLTISSLQPEDFATYYCQQYYSTPWTFGQGT
KVEIKRGLAVSTISSFFPPGYQIYIWAPLAGTCGVLLLSLVITLYCKRGRKKLLYIFKQPFMRPVQTTQEED
GCSCRFPEEEEGGCELRVKFSRSADAPAYQQGQNQLYNELNLGRREEYDVLDKRRGRDPEMGGKPR
RKNPQEGLYNELQKDKMAEAYSEIGMKGERRRGKGHDGLYQGLSTATKDTYDALHMQALPPR
VL5
MALPVTALLLPLALLLHAARPEVKLVESGGGLVQPGRSLRLSCTASGFTFTDYYMSWVRQAPGKGLE
WVGLIRSKADGYTTEYSASVKGRFTISRDDSKSILYLQMNSLKTEDTAVYYCARDAAYYSYYSPEGAMD
YWGQGTLVTVSSGGGGSGGGGSGGGGSMADYKDIQMTQSPSSVSASVGDRVTITCRASQNVDSAV
AWYQQKPGKAPKLLIYSASYRQSGVPSRFSGSGSGTDFTLTISSLQPEDFATYYCQQYYSTPWTFGQGT
KVEIKRGLAVSTISSFFPPGYQIYIWAPLAGTCGVLLLSLVITLYCKRGRKKLLYIFKQPFMRPVQTTQEED
GCSCRFPEEEEGGCELRVKFSRSADAPAYQQGQNQLYNELNLGRREEYDVLDKRRGRDPEMGGKPR
RKNPQEGLYNELQKDKMAEAYSEIGMKGERRRGKGHDGLYQGLSTATKDTYDALHMQALPPR
VL6
MALPVTALLLPLALLLHAARPEVKLVESGGGLVQPGRSLRLSCTASGFTFTDYYMSWVRQAPGKGLE
WVGLIRSKADGYTTEYSASVKGRFTISRDDSKSILYLQMNSLKTEDTAVYYCARDAAYYSYYSPEGAMD
YWGQGTLVTVSSGGGGSGGGGSGGGGSMADYKDIQMTQSPSSVSASVGDRVTITCRASQNVDSAV
AWYQQKPGKAPKLLIYSASYGQSGVPSRFSGSGSGTDFTLTISSLQPEDFATYYCQQYYSTPWTFGQG
TKVEIKRGLAVSTISSFFPPGYQIYIWAPLAGTCGVLLLSLVITLYCKRGRKKLLYIFKQPFMRPVQTTQEE
DGCSCRFPEEEEGGCELRVKFSRSADAPAYQQGQNQLYNELNLGRREEYDVLDKRRGRDPEMGGKP
RRKNPQEGLYNELQKDKMAEAYSEIGMKGERRRGKGHDGLYQGLSTATKDTYDALHMQALPPR
Version 1 VH2
VL1
MALPVTALLLPLALLLHAARPEVQLVESGGGLVQPGRSLRLSCTASGFTFTDYYMSWVRQAPGKGLE
WVGLIRSKADGYTTEYSASVKGRFTISRDDSKSILYLQMNSLKTEDTAVYYCARDAAYYSYYSPEGAMD
YWGQGTLVTVSSGGGGSGGGGSGGGGSMADYKDIVMTQSPSSVSASVGDRVTITCRASQNVDSAV
AWYQQKPGKAPKALIYSASYRYSGVPSRFSGRGSGTDFTLTISSLQPEDFATYYCQQYYSTPWTFGQGT
KVEIKRGLAVSTISSFFPPGYQIYIWAPLAGTCGVLLLSLVITLYCKRGRKKLLYIFKQPFMRPVQTTQEED
GCSCRFPEEEEGGCELRVKFSRSADAPAYQQGQNQLYNELNLGRREEYDVLDKRRGRDPEMGGKPR
RKNPQEGLYNELQKDKMAEAYSEIGMKGERRRGKGHDGLYQGLSTATKDTYDALHMQALPPR
VL2
MALPVTALLLPLALLLHAARPEVQLVESGGGLVQPGRSLRLSCTASGFTFTDYYMSWVRQAPGKGLE
WVGLIRSKADGYTTEYSASVKGRFTISRDDSKSILYLQMNSLKTEDTAVYYCARDAAYYSYYSPEGAMD
YWGQGTLVTVSSGGGGSGGGGSGGGGSMADYKDIQMTQSPSSVSASVGDRVTITCRASQNVDSAV
AWYQQKPGKAPKALIYSASYRYSGVPSRFSGRGSGTDFTLTISSLQPEDFATYYCQQYYSTPWTFGQGT
KVEIKRGLAVSTISSFFPPGYQIYIWAPLAGTCGVLLLSLVITLYCKRGRKKLLYIFKQPFMRPVQTTQEED
GCSCRFPEEEEGGCELRVKFSRSADAPAYQQGQNQLYNELNLGRREEYDVLDKRRGRDPEMGGKPR
RKNPQEGLYNELQKDKMAEAYSEIGMKGERRRGKGHDGLYQGLSTATKDTYDALHMQALPPR
VL3
MALPVTALLLPLALLLHAARPEVQLVESGGGLVQPGRSLRLSCTASGFTFTDYYMSWVRQAPGKGLE
WVGLIRSKADGYTTEYSASVKGRFTISRDDSKSILYLQMNSLKTEDTAVYYCARDAAYYSYYSPEGAMD
YWGQGTLVTVSSGGGGSGGGGSGGGGSMADYKDIQMTQSPSSVSASVGDRVTITCRASQNVDSAV
AWYQQKPGKAPKALIYSASYRYSGVPSRFSGSGSGTDFTLTISSLQPEDFATYYCQQYYSTPWTFGQGT
KVEIKRGLAVSTISSFFPPGYQIYIWAPLAGTCGVLLLSLVITLYCKRGRKKLLYIFKQPFMRPVQTTQEED
GCSCRFPEEEEGGCELRVKFSRSADAPAYQQGQNQLYNELNLGRREEYDVLDKRRGRDPEMGGKPR
RKNPQEGLYNELQKDKMAEAYSEIGMKGERRRGKGHDGLYQGLSTATKDTYDALHMQALPPR
VL4
MALPVTALLLPLALLLHAARPEVQLVESGGGLVQPGRSLRLSCTASGFTFTDYYMSWVRQAPGKGLE
WVGLIRSKADGYTTEYSASVKGRFTISRDDSKSILYLQMNSLKTEDTAVYYCARDAAYYSYYSPEGAMD
YWGQGTLVTVSSGGGGSGGGGSGGGGSMADYKDIQMTQSPSSVSASVGDRVTITCRASQNVDSAV
AWYQQKPGKAPKLLIYSASYRYSGVPSRFSGSGSGTDFTLTISSLQPEDFATYYCQQYYSTPWTFGQGT
KVEIKRGLAVSTISSFFPPGYQIYIWAPLAGTCGVLLLSLVITLYCKRGRKKLLYIFKQPFMRPVQTTQEED
GCSCRFPEEEEGGCELRVKFSRSADAPAYQQGQNQLYNELNLGRREEYDVLDKRRGRDPEMGGKPR
RKNPQEGLYNELQKDKMAEAYSEIGMKGERRRGKGHDGLYQGLSTATKDTYDALHMQALPPR
VL5
MALPVTALLLPLALLLHAARPEVQLVESGGGLVQPGRSLRLSCTASGFTFTDYYMSWVRQAPGKGLE
WVGLIRSKADGYTTEYSASVKGRFTISRDDSKSILYLQMNSLKTEDTAVYYCARDAAYYSYYSPEGAMD
YWGQGTLVTVSSGGGGSGGGGSGGGGSMADYKDIQMTQSPSSVSASVGDRVTITCRASQNVDSAV
AWYQQKPGKAPKLLIYSASYRQSGVPSRFSGSGSGTDFTLTISSLQPEDFATYYCQQYYSTPWTFGQGT
KVEIKRGLAVSTISSFFPPGYQIYIWAPLAGTCGVLLLSLVITLYCKRGRKKLLYIFKQPFMRPVQTTQEED
GCSCRFPEEEEGGCELRVKFSRSADAPAYQQGQNQLYNELNLGRREEYDVLDKRRGRDPEMGGKPR
RKNPQEGLYNELQKDKMAEAYSEIGMKGERRRGKGHDGLYQGLSTATKDTYDALHMQALPPR
VL6
MALPVTALLLPLALLLHAARPEVQLVESGGGLVQPGRSLRLSCTASGFTFTDYYMSWVRQAPGKGLE
WVGLIRSKADGYTTEYSASVKGRFTISRDDSKSILYLQMNSLKTEDTAVYYCARDAAYYSYYSPEGAMD
YWGQGTLVTVSSGGGGSGGGGSGGGGSMADYKDIQMTQSPSSVSASVGDRVTITCRASQNVDSAV
AWYQQKPGKAPKLLIYSASYGQSGVPSRFSGSGSGTDFTLTISSLQPEDFATYYCQQYYSTPWTFGQG
TKVEIKRGLAVSTISSFFPPGYQIYIWAPLAGTCGVLLLSLVITLYCKRGRKKLLYIFKQPFMRPVQTTQEE
DGCSCRFPEEEEGGCELRVKFSRSADAPAYQQGQNQLYNELNLGRREEYDVLDKRRGRDPEMGGKP
RRKNPQEGLYNELQKDKMAEAYSEIGMKGERRRGKGHDGLYQGLSTATKDTYDALHMQALPPR
Version 1 VH3
VL1
MALPVTALLLPLALLLHAARPEVQLVESGGGLVQPGRSLRLSCTASGFTFTDYYMSWVRQAPGKGLE
WVGLIRSKADGYTTEYSASVKGRFTISRDDSKSIAYLQMNSLKTEDTAVYYCARDAAYYSYYSPEGAMD
YWGQGTLVTVSSGGGGSGGGGSGGGGSMADYKDIVMTQSPSSVSASVGDRVTITCRASQNVDSAV
AWYQQKPGKAPKALIYSASYRYSGVPSRFSGRGSGTDFTLTISSLQPEDFATYYCQQYYSTPWTFGQGT
KVEIKRGLAVSTISSFFPPGYQIYIWAPLAGTCGVLLLSLVITLYCKRGRKKLLYIFKQPFMRPVQTTQEED
GCSCRFPEEEEGGCELRVKFSRSADAPAYQQGQNQLYNELNLGRREEYDVLDKRRGRDPEMGGKPR
RKNPQEGLYNELQKDKMAEAYSEIGMKGERRRGKGHDGLYQGLSTATKDTYDALHMQALPPR
VL2
MALPVTALLLPLALLLHAARPEVQLVESGGGLVQPGRSLRLSCTASGFTFTDYYMSWVRQAPGKGLE
WVGLIRSKADGYTTEYSASVKGRFTISRDDSKSIAYLQMNSLKTEDTAVYYCARDAAYYSYYSPEGAMD
YWGQGTLVTVSSGGGGSGGGGSGGGGSMADYKDIQMTQSPSSVSASVGDRVTITCRASQNVDSAV
AWYQQKPGKAPKALIYSASYRYSGVPSRFSGRGSGTDFTLTISSLQPEDFATYYCQQYYSTPWTFGQGT
KVEIKRGLAVSTISSFFPPGYQIYIWAPLAGTCGVLLLSLVITLYCKRGRKKLLYIFKQPFMRPVQTTQEED
GCSCRFPEEEEGGCELRVKFSRSADAPAYQQGQNQLYNELNLGRREEYDVLDKRRGRDPEMGGKPR
RKNPQEGLYNELQKDKMAEAYSEIGMKGERRRGKGHDGLYQGLSTATKDTYDALHMQALPPR
VL3
MALPVTALLLPLALLLHAARPEVQLVESGGGLVQPGRSLRLSCTASGFTFTDYYMSWVRQAPGKGLE
WVGLIRSKADGYTTEYSASVKGRFTISRDDSKSIAYLQMNSLKTEDTAVYYCARDAAYYSYYSPEGAMD
YWGQGTLVTVSSGGGGSGGGGSGGGGSMADYKDIQMTQSPSSVSASVGDRVTITCRASQNVDSAV
AWYQQKPGKAPKALIYSASYRYSGVPSRFSGSGSGTDFTLTISSLQPEDFATYYCQQYYSTPWTFGQGT
KVEIKRGLAVSTISSFFPPGYQIYIWAPLAGTCGVLLLSLVITLYCKRGRKKLLYIFKQPFMRPVQTTQEED
GCSCRFPEEEEGGCELRVKFSRSADAPAYQQGQNQLYNELNLGRREEYDVLDKRRGRDPEMGGKPR
RKNPQEGLYNELQKDKMAEAYSEIGMKGERRRGKGHDGLYQGLSTATKDTYDALHMQALPPR
VL4
MALPVTALLLPLALLLHAARPEVQLVESGGGLVQPGRSLRLSCTASGFTFTDYYMSWVRQAPGKGLE
WVGLIRSKADGYTTEYSASVKGRFTISRDDSKSIAYLQMNSLKTEDTAVYYCARDAAYYSYYSPEGAMD
YWGQGTLVTVSSGGGGSGGGGSGGGGSMADYKDIQMTQSPSSVSASVGDRVTITCRASQNVDSAV
AWYQQKPGKAPKLLIYSASYRYSGVPSRFSGSGSGTDFTLTISSLQPEDFATYYCQQYYSTPWTFGQGT
KVEIKRGLAVSTISSFFPPGYQIYIWAPLAGTCGVLLLSLVITLYCKRGRKKLLYIFKQPFMRPVQTTQEED
GCSCRFPEEEEGGCELRVKFSRSADAPAYQQGQNQLYNELNLGRREEYDVLDKRRGRDPEMGGKPR
RKNPQEGLYNELQKDKMAEAYSEIGMKGERRRGKGHDGLYQGLSTATKDTYDALHMQALPPR
VL5
MALPVTALLLPLALLLHAARPEVQLVESGGGLVQPGRSLRLSCTASGFTFTDYYMSWVRQAPGKGLE
WVGLIRSKADGYTTEYSASVKGRFTISRDDSKSIAYLQMNSLKTEDTAVYYCARDAAYYSYYSPEGAMD
YWGQGTLVTVSSGGGGSGGGGSGGGGSMADYKDIQMTQSPSSVSASVGDRVTITCRASQNVDSAV
AWYQQKPGKAPKLLIYSASYRQSGVPSRFSGSGSGTDFTLTISSLQPEDFATYYCQQYYSTPWTFGQGT
KVEIKRGLAVSTISSFFPPGYQIYIWAPLAGTCGVLLLSLVITLYCKRGRKKLLYIFKQPFMRPVQTTQEED
GCSCRFPEEEEGGCELRVKFSRSADAPAYQQGQNQLYNELNLGRREEYDVLDKRRGRDPEMGGKPR
RKNPQEGLYNELQKDKMAEAYSEIGMKGERRRGKGHDGLYQGLSTATKDTYDALHMQALPPR
VL6
MALPVTALLLPLALLLHAARPEVQLVESGGGLVQPGRSLRLSCTASGFTFTDYYMSWVRQAPGKGLE
WVGLIRSKADGYTTEYSASVKGRFTISRDDSKSIAYLQMNSLKTEDTAVYYCARDAAYYSYYSPEGAMD
YWGQGTLVTVSSGGGGSGGGGSGGGGSMADYKDIQMTQSPSSVSASVGDRVTITCRASQNVDSAV
AWYQQKPGKAPKLLIYSASYGQSGVPSRFSGSGSGTDFTLTISSLQPEDFATYYCQQYYSTPWTFGQG
TKVEIKRGLAVSTISSFFPPGYQIYIWAPLAGTCGVLLLSLVITLYCKRGRKKLLYIFKQPFMRPVQTTQEE
DGCSCRFPEEEEGGCELRVKFSRSADAPAYQQGQNQLYNELNLGRREEYDVLDKRRGRDPEMGGKP
RRKNPQEGLYNELQKDKMAEAYSEIGMKGERRRGKGHDGLYQGLSTATKDTYDALHMQALPPR
Version 1 VH4
VL1
MALPVTALLLPLALLLHAARPEVQLVESGGGLVQPGRSLRLSCTASGFTFTDYYMSWVRQAPGKGLE
WVGFIRSKADGYTTEYSASVKGRFTISRDDSKSIAYLQMNSLKTEDTAVYYCARDAAYYSYYSPEGAMD
YWGQGTLVTVSSGGGGSGGGGSGGGGSMADYKDIVMTQSPSSVSASVGDRVTITCRASQNVDSAV
AWYQQKPGKAPKALIYSASYRYSGVPSRFSGRGSGTDFTLTISSLQPEDFATYYCQQYYSTPWTFGQGT
KVEIKRGLAVSTISSFFPPGYQIYIWAPLAGTCGVLLLSLVITLYCKRGRKKLLYIFKQPFMRPVQTTQEED
GCSCRFPEEEEGGCELRVKFSRSADAPAYQQGQNQLYNELNLGRREEYDVLDKRRGRDPEMGGKPR
RKNPQEGLYNELQKDKMAEAYSEIGMKGERRRGKGHDGLYQGLSTATKDTYDALHMQALPPR
VL2
MALPVTALLLPLALLLHAARPEVQLVESGGGLVQPGRSLRLSCTASGFTFTDYYMSWVRQAPGKGLE
WVGFIRSKADGYTTEYSASVKGRFTISRDDSKSIAYLQMNSLKTEDTAVYYCARDAAYYSYYSPEGAMD
YWGQGTLVTVSSGGGGSGGGGSGGGGSMADYKDIQMTQSPSSVSASVGDRVTITCRASQNVDSAV
AWYQQKPGKAPKALIYSASYRYSGVPSRFSGRGSGTDFTLTISSLQPEDFATYYCQQYYSTPWTFGQGT
KVEIKRGLAVSTISSFFPPGYQIYIWAPLAGTCGVLLLSLVITLYCKRGRKKLLYIFKQPFMRPVQTTQEED
GCSCRFPEEEEGGCELRVKFSRSADAPAYQQGQNQLYNELNLGRREEYDVLDKRRGRDPEMGGKPR
RKNPQEGLYNELQKDKMAEAYSEIGMKGERRRGKGHDGLYQGLSTATKDTYDALHMQALPPR
VL3
MALPVTALLLPLALLLHAARPEVQLVESGGGLVQPGRSLRLSCTASGFTFTDYYMSWVRQAPGKGLE
WVGFIRSKADGYTTEYSASVKGRFTISRDDSKSIAYLQMNSLKTEDTAVYYCARDAAYYSYYSPEGAMD
YWGQGTLVTVSSGGGGSGGGGSGGGGSMADYKDIQMTQSPSSVSASVGDRVTITCRASQNVDSAV
AWYQQKPGKAPKALIYSASYRYSGVPSRFSGSGSGTDFTLTISSLQPEDFATYYCQQYYSTPWTFGQGT
KVEIKRGLAVSTISSFFPPGYQIYIWAPLAGTCGVLLLSLVITLYCKRGRKKLLYIFKQPFMRPVQTTQEED
GCSCRFPEEEEGGCELRVKFSRSADAPAYQQGQNQLYNELNLGRREEYDVLDKRRGRDPEMGGKPR
RKNPQEGLYNELQKDKMAEAYSEIGMKGERRRGKGHDGLYQGLSTATKDTYDALHMQALPPR
VL4
MALPVTALLLPLALLLHAARPEVQLVESGGGLVQPGRSLRLSCTASGFTFTDYYMSWVRQAPGKGLE
WVGFIRSKADGYTTEYSASVKGRFTISRDDSKSIAYLQMNSLKTEDTAVYYCARDAAYYSYYSPEGAMD
YWGQGTLVTVSSGGGGSGGGGSGGGGSMADYKDIQMTQSPSSVSASVGDRVTITCRASQNVDSAV
AWYQQKPGKAPKLLIYSASYRYSGVPSRFSGSGSGTDFTLTISSLQPEDFATYYCQQYYSTPWTFGQGT
KVEIKRGLAVSTISSFFPPGYQIYIWAPLAGTCGVLLLSLVITLYCKRGRKKLLYIFKQPFMRPVQTTQEED
GCSCRFPEEEEGGCELRVKFSRSADAPAYQQGQNQLYNELNLGRREEYDVLDKRRGRDPEMGGKPR
RKNPQEGLYNELQKDKMAEAYSEIGMKGERRRGKGHDGLYQGLSTATKDTYDALHMQALPPR
VL5
MALPVTALLLPLALLLHAARPEVQLVESGGGLVQPGRSLRLSCTASGFTFTDYYMSWVRQAPGKGLE
WVGFIRSKADGYTTEYSASVKGRFTISRDDSKSIAYLQMNSLKTEDTAVYYCARDAAYYSYYSPEGAMD
YWGQGTLVTVSSGGGGSGGGGSGGGGSMADYKDIQMTQSPSSVSASVGDRVTITCRASQNVDSAV
AWYQQKPGKAPKLLIYSASYRQSGVPSRFSGSGSGTDFTLTISSLQPEDFATYYCQQYYSTPWTFGQGT
KVEIKRGLAVSTISSFFPPGYQIYIWAPLAGTCGVLLLSLVITLYCKRGRKKLLYIFKQPFMRPVQTTQEED
GCSCRFPEEEEGGCELRVKFSRSADAPAYQQGQNQLYNELNLGRREEYDVLDKRRGRDPEMGGKPR
RKNPQEGLYNELQKDKMAEAYSEIGMKGERRRGKGHDGLYQGLSTATKDTYDALHMQALPPR
VL6
MALPVTALLLPLALLLHAARPEVQLVESGGGLVQPGRSLRLSCTASGFTFTDYYMSWVRQAPGKGLE
WVGFIRSKADGYTTEYSASVKGRFTISRDDSKSIAYLQMNSLKTEDTAVYYCARDAAYYSYYSPEGAMD
YWGQGTLVTVSSGGGGSGGGGSGGGGSMADYKDIQMTQSPSSVSASVGDRVTITCRASQNVDSAV
AWYQQKPGKAPKLLIYSASYGQSGVPSRFSGSGSGTDFTLTISSLQPEDFATYYCQQYYSTPWTFGQG
TKVEIKRGLAVSTISSFFPPGYQIYIWAPLAGTCGVLLLSLVITLYCKRGRKKLLYIFKQPFMRPVQTTQEE
DGCSCRFPEEEEGGCELRVKFSRSADAPAYQQGQNQLYNELNLGRREEYDVLDKRRGRDPEMGGKP
RRKNPQEGLYNELQKDKMAEAYSEIGMKGERRRGKGHDGLYQGLSTATKDTYDALHMQALPPR
Version 1 VH5
VL1
MALPVTALLLPLALLLHAARPEVQLVESGGGLVQPGRSLRLSCTASGFTFTDYYMSWVRQAPGKGLE
WVGFIRSKADGYTTEYAASVKGRFTISRDDSKSIAYLQMNSLKTEDTAVYYCARDAAYYSYYSPEGAM
DYWGQGTLVTVSSGGGGSGGGGSGGGGSMADYKDIVMTQSPSSVSASVGDRVTITCRASQNVDSA
VAWYQQKPGKAPKALIYSASYRYSGVPSRFSGRGSGTDFTLTISSLQPEDFATYYCQQYYSTPWTFGQ
GTKVEIKRGLAVSTISSFFPPGYQIYIWAPLAGTCGVLLLSLVITLYCKRGRKKLLYIFKQPFMRPVQTTQE
EDGCSCRFPEEEEGGCELRVKFSRSADAPAYQQGQNQLYNELNLGRREEYDVLDKRRGRDPEMGGK
PRRKNPQEGLYNELQKDKMAEAYSEIGMKGERRRGKGHDGLYQGLSTATKDTYDALHMQALPPR
VL2
MALPVTALLLPLALLLHAARPEVQLVESGGGLVQPGRSLRLSCTASGFTFTDYYMSWVRQAPGKGLE
WVGFIRSKADGYTTEYAASVKGRFTISRDDSKSIAYLQMNSLKTEDTAVYYCARDAAYYSYYSPEGAM
DYWGQGTLVTVSSGGGGSGGGGSGGGGSMADYKDIQMTQSPSSVSASVGDRVTITCRASQNVDSA
VAWYQQKPGKAPKALIYSASYRYSGVPSRFSGRGSGTDFTLTISSLQPEDFATYYCQQYYSTPWTFGQ
GTKVEIKRGLAVSTISSFFPPGYQIYIWAPLAGTCGVLLLSLVITLYCKRGRKKLLYIFKQPFMRPVQTTQE
EDGCSCRFPEEEEGGCELRVKFSRSADAPAYQQGQNQLYNELNLGRREEYDVLDKRRGRDPEMGGK
PRRKNPQEGLYNELQKDKMAEAYSEIGMKGERRRGKGHDGLYQGLSTATKDTYDALHMQALPPR
VL3
MALPVTALLLPLALLLHAARPEVQLVESGGGLVQPGRSLRLSCTASGFTFTDYYMSWVRQAPGKGLE
WVGFIRSKADGYTTEYAASVKGRFTISRDDSKSIAYLQMNSLKTEDTAVYYCARDAAYYSYYSPEGAM
DYWGQGTLVTVSSGGGGSGGGGSGGGGSMADYKDIQMTQSPSSVSASVGDRVTITCRASQNVDSA
VAWYQQKPGKAPKALIYSASYRYSGVPSRFSGSGSGTDFTLTISSLQPEDFATYYCQQYYSTPWTFGQG
TKVEIKRGLAVSTISSFFPPGYQIYIWAPLAGTCGVLLLSLVITLYCKRGRKKLLYIFKQPFMRPVQTTQEE
DGCSCRFPEEEEGGCELRVKFSRSADAPAYQQGQNQLYNELNLGRREEYDVLDKRRGRDPEMGGKP
RRKNPQEGLYNELQKDKMAEAYSEIGMKGERRRGKGHDGLYQGLSTATKDTYDALHMQALPPR
VL4
MALPVTALLLPLALLLHAARPEVQLVESGGGLVQPGRSLRLSCTASGFTFTDYYMSWVRQAPGKGLE
WVGFIRSKADGYTTEYAASVKGRFTISRDDSKSIAYLQMNSLKTEDTAVYYCARDAAYYSYYSPEGAM
DYWGQGTLVTVSSGGGGSGGGGSGGGGSMADYKDIQMTQSPSSVSASVGDRVTITCRASQNVDSA
VAWYQQKPGKAPKLLIYSASYRYSGVPSRFSGSGSGTDFTLTISSLQPEDFATYYCQQYYSTPWTFGQG
TKVEIKRGLAVSTISSFFPPGYQIYIWAPLAGTCGVLLLSLVITLYCKRGRKKLLYIFKQPFMRPVQTTQEE
DGCSCRFPEEEEGGCELRVKFSRSADAPAYQQGQNQLYNELNLGRREEYDVLDKRRGRDPEMGGKP
RRKNPQEGLYNELQKDKMAEAYSEIGMKGERRRGKGHDGLYQGLSTATKDTYDALHMQALPPR
VL5
MALPVTALLLPLALLLHAARPEVQLVESGGGLVQPGRSLRLSCTASGFTFTDYYMSWVRQAPGKGLE
WVGFIRSKADGYTTEYAASVKGRFTISRDDSKSIAYLQMNSLKTEDTAVYYCARDAAYYSYYSPEGAM
DYWGQGTLVTVSSGGGGSGGGGSGGGGSMADYKDIQMTQSPSSVSASVGDRVTITCRASQNVDSA
VAWYQQKPGKAPKLLIYSASYRQSGVPSRFSGSGSGTDFTLTISSLQPEDFATYYCQQYYSTPWTFGQ
GTKVEIKRGLAVSTISSFFPPGYQIYIWAPLAGTCGVLLLSLVITLYCKRGRKKLLYIFKQPFMRPVQTTQE
EDGCSCRFPEEEEGGCELRVKFSRSADAPAYQQGQNQLYNELNLGRREEYDVLDKRRGRDPEMGGK
PRRKNPQEGLYNELQKDKMAEAYSEIGMKGERRRGKGHDGLYQGLSTATKDTYDALHMQALPPR
VL6
MALPVTALLLPLALLLHAARPEVQLVESGGGLVQPGRSLRLSCTASGFTFTDYYMSWVRQAPGKGLE
WVGFIRSKADGYTTEYAASVKGRFTISRDDSKSIAYLQMNSLKTEDTAVYYCARDAAYYSYYSPEGAM
DYWGQGTLVTVSSGGGGSGGGGSGGGGSMADYKDIQMTQSPSSVSASVGDRVTITCRASQNVDSA
VAWYQQKPGKAPKLLIYSASYGQSGVPSRFSGSGSGTDFTLTISSLQPEDFATYYCQQYYSTPWTFGQ
GTKVEIKRGLAVSTISSFFPPGYQIYIWAPLAGTCGVLLLSLVITLYCKRGRKKLLYIFKQPFMRPVQTTQE
EDGCSCRFPEEEEGGCELRVKFSRSADAPAYQQGQNQLYNELNLGRREEYDVLDKRRGRDPEMGGK
PRRKNPQEGLYNELQKDKMAEAYSEIGMKGERRRGKGHDGLYQGLSTATKDTYDALHMQALPPR
Version 1 VH6
VL1
MALPVTALLLPLALLLHAARPEVQLVESGGGLVQPGRSLRLSCTASGFTFTDYYMSWVRQAPGKGLE
WVGLIRSKADGYTTEYAASVKGRFTISRDDSKSIAYLQMNSLKTEDTAVYYCARDAAYYSYYSPEGAM
DYWGQGTLVTVSSGGGGSGGGGSGGGGSMADYKDIVMTQSPSSVSASVGDRVTITCRASQNVDSA
VAWYQQKPGKAPKALIYSASYRYSGVPSRFSGRGSGTDFTLTISSLQPEDFATYYCQQYYSTPWTFGQ
GTKVEIKRGLAVSTISSFFPPGYQIYIWAPLAGTCGVLLLSLVITLYCKRGRKKLLYIFKQPFMRPVQTTQE
EDGCSCRFPEEEEGGCELRVKFSRSADAPAYQQGQNQLYNELNLGRREEYDVLDKRRGRDPEMGGK
PRRKNPQEGLYNELQKDKMAEAYSEIGMKGERRRGKGHDGLYQGLSTATKDTYDALHMQALPPR
VL2
MALPVTALLLPLALLLHAARPEVQLVESGGGLVQPGRSLRLSCTASGFTFTDYYMSWVRQAPGKGLE
WVGLIRSKADGYTTEYAASVKGRFTISRDDSKSIAYLQMNSLKTEDTAVYYCARDAAYYSYYSPEGAM
DYWGQGTLVTVSSGGGGSGGGGSGGGGSMADYKDIQMTQSPSSVSASVGDRVTITCRASQNVDSA
VAWYQQKPGKAPKALIYSASYRYSGVPSRFSGRGSGTDFTLTISSLQPEDFATYYCQQYYSTPWTFGQ
GTKVEIKRGLAVSTISSFFPPGYQIYIWAPLAGTCGVLLLSLVITLYCKRGRKKLLYIFKQPFMRPVQTTQE
EDGCSCRFPEEEEGGCELRVKFSRSADAPAYQQGQNQLYNELNLGRREEYDVLDKRRGRDPEMGGK
PRRKNPQEGLYNELQKDKMAEAYSEIGMKGERRRGKGHDGLYQGLSTATKDTYDALHMQALPPR
VL3
MALPVTALLLPLALLLHAARPEVQLVESGGGLVQPGRSLRLSCTASGFTFTDYYMSWVRQAPGKGLE
WVGLIRSKADGYTTEYAASVKGRFTISRDDSKSIAYLQMNSLKTEDTAVYYCARDAAYYSYYSPEGAM
DYWGQGTLVTVSSGGGGSGGGGSGGGGSMADYKDIQMTQSPSSVSASVGDRVTITCRASQNVDSA
VAWYQQKPGKAPKALIYSASYRYSGVPSRFSGSGSGTDFTLTISSLQPEDFATYYCQQYYSTPWTFGQG
TKVEIKRGLAVSTISSFFPPGYQIYIWAPLAGTCGVLLLSLVITLYCKRGRKKLLYIFKQPFMRPVQTTQEE
DGCSCRFPEEEEGGCELRVKFSRSADAPAYQQGQNQLYNELNLGRREEYDVLDKRRGRDPEMGGKP
RRKNPQEGLYNELQKDKMAEAYSEIGMKGERRRGKGHDGLYQGLSTATKDTYDALHMQALPPR
VL4
MALPVTALLLPLALLLHAARPEVQLVESGGGLVQPGRSLRLSCTASGFTFTDYYMSWVRQAPGKGLE
WVGLIRSKADGYTTEYAASVKGRFTISRDDSKSIAYLQMNSLKTEDTAVYYCARDAAYYSYYSPEGAM
DYWGQGTLVTVSSGGGGSGGGGSGGGGSMADYKDIQMTQSPSSVSASVGDRVTITCRASQNVDSA
VAWYQQKPGKAPKLLIYSASYRYSGVPSRFSGSGSGTDFTLTISSLQPEDFATYYCQQYYSTPWTFGQG
TKVEIKRGLAVSTISSFFPPGYQIYIWAPLAGTCGVLLLSLVITLYCKRGRKKLLYIFKQPFMRPVQTTQEE
DGCSCRFPEEEEGGCELRVKFSRSADAPAYQQGQNQLYNELNLGRREEYDVLDKRRGRDPEMGGKP
RRKNPQEGLYNELQKDKMAEAYSEIGMKGERRRGKGHDGLYQGLSTATKDTYDALHMQALPPR
VL5
MALPVTALLLPLALLLHAARPEVQLVESGGGLVQPGRSLRLSCTASGFTFTDYYMSWVRQAPGKGLE
WVGLIRSKADGYTTEYAASVKGRFTISRDDSKSIAYLQMNSLKTEDTAVYYCARDAAYYSYYSPEGAM
DYWGQGTLVTVSSGGGGSGGGGSGGGGSMADYKDIQMTQSPSSVSASVGDRVTITCRASQNVDSA
VAWYQQKPGKAPKLLIYSASYRQSGVPSRFSGSGSGTDFTLTISSLQPEDFATYYCQQYYSTPWTFGQ
GTKVEIKRGLAVSTISSFFPPGYQIYIWAPLAGTCGVLLLSLVITLYCKRGRKKLLYIFKQPFMRPVQTTQE
EDGCSCRFPEEEEGGCELRVKFSRSADAPAYQQGQNQLYNELNLGRREEYDVLDKRRGRDPEMGGK
PRRKNPQEGLYNELQKDKMAEAYSEIGMKGERRRGKGHDGLYQGLSTATKDTYDALHMQALPPR
VL6
MALPVTALLLPLALLLHAARPEVQLVESGGGLVQPGRSLRLSCTASGFTFTDYYMSWVRQAPGKGLE
WVGLIRSKADGYTTEYAASVKGRFTISRDDSKSIAYLQMNSLKTEDTAVYYCARDAAYYSYYSPEGAM
DYWGQGTLVTVSSGGGGSGGGGSGGGGSMADYKDIQMTQSPSSVSASVGDRVTITCRASQNVDSA
VAWYQQKPGKAPKLLIYSASYGQSGVPSRFSGSGSGTDFTLTISSLQPEDFATYYCQQYYSTPWTFGQ
GTKVEIKRGLAVSTISSFFPPGYQIYIWAPLAGTCGVLLLSLVITLYCKRGRKKLLYIFKQPFMRPVQTTQE
EDGCSCRFPEEEEGGCELRVKFSRSADAPAYQQGQNQLYNELNLGRREEYDVLDKRRGRDPEMGGK
PRRKNPQEGLYNELQKDKMAEAYSEIGMKGERRRGKGHDGLYQGLSTATKDTYDALHMQALPPR
Version 1 VH7
VL1
MALPVTALLLPLALLLHAARPEVQLVESGGGLVQPGRSLRLSCTASGFTFTDYYMSWVRQAPGKGLE
WVGFIRSKADGYTTEYAASVKGRFTISRDDSKSIAYLQMNSLKTEDTAVYYCTRDAAYYSYYSPEGAMD
YWGQGTLVTVSSGGGGSGGGGSGGGGSMADYKDIVMTQSPSSVSASVGDRVTITCRASQNVDSAV
AWYQQKPGKAPKALIYSASYRYSGVPSRFSGRGSGTDFTLTISSLQPEDFATYYCQQYYSTPWTFGQGT
KVEIKRGLAVSTISSFFPPGYQIYIWAPLAGTCGVLLLSLVITLYCKRGRKKLLYIFKQPFMRPVQTTQEED
GCSCRFPEEEEGGCELRVKFSRSADAPAYQQGQNQLYNELNLGRREEYDVLDKRRGRDPEMGGKPR
RKNPQEGLYNELQKDKMAEAYSEIGMKGERRRGKGHDGLYQGLSTATKDTYDALHMQALPPR
VL2
MALPVTALLLPLALLLHAARPEVQLVESGGGLVQPGRSLRLSCTASGFTFTDYYMSWVRQAPGKGLE
WVGFIRSKADGYTTEYAASVKGRFTISRDDSKSIAYLQMNSLKTEDTAVYYCTRDAAYYSYYSPEGAMD
YWGQGTLVTVSSGGGGSGGGGSGGGGSMADYKDIQMTQSPSSVSASVGDRVTITCRASQNVDSAV
AWYQQKPGKAPKALIYSASYRYSGVPSRFSGRGSGTDFTLTISSLQPEDFATYYCQQYYSTPWTFGQGT
KVEIKRGLAVSTISSFFPPGYQIYIWAPLAGTCGVLLLSLVITLYCKRGRKKLLYIFKQPFMRPVQTTQEED
GCSCRFPEEEEGGCELRVKFSRSADAPAYQQGQNQLYNELNLGRREEYDVLDKRRGRDPEMGGKPR
RKNPQEGLYNELQKDKMAEAYSEIGMKGERRRGKGHDGLYQGLSTATKDTYDALHMQALPPR
VL3
MALPVTALLLPLALLLHAARPEVQLVESGGGLVQPGRSLRLSCTASGFTFTDYYMSWVRQAPGKGLE
WVGFIRSKADGYTTEYAASVKGRFTISRDDSKSIAYLQMNSLKTEDTAVYYCTRDAAYYSYYSPEGAMD
YWGQGTLVTVSSGGGGSGGGGSGGGGSMADYKDIQMTQSPSSVSASVGDRVTITCRASQNVDSAV
AWYQQKPGKAPKALIYSASYRYSGVPSRFSGSGSGTDFTLTISSLQPEDFATYYCQQYYSTPWTFGQGT
KVEIKRGLAVSTISSFFPPGYQIYIWAPLAGTCGVLLLSLVITLYCKRGRKKLLYIFKQPFMRPVQTTQEED
GCSCRFPEEEEGGCELRVKFSRSADAPAYQQGQNQLYNELNLGRREEYDVLDKRRGRDPEMGGKPR
RKNPQEGLYNELQKDKMAEAYSEIGMKGERRRGKGHDGLYQGLSTATKDTYDALHMQALPPR
VL4
MALPVTALLLPLALLLHAARPEVQLVESGGGLVQPGRSLRLSCTASGFTFTDYYMSWVRQAPGKGLE
WVGFIRSKADGYTTEYAASVKGRFTISRDDSKSIAYLQMNSLKTEDTAVYYCTRDAAYYSYYSPEGAMD
YWGQGTLVTVSSGGGGSGGGGSGGGGSMADYKDIQMTQSPSSVSASVGDRVTITCRASQNVDSAV
AWYQQKPGKAPKLLIYSASYRYSGVPSRFSGSGSGTDFTLTISSLQPEDFATYYCQQYYSTPWTFGQGT
KVEIKRGLAVSTISSFFPPGYQIYIWAPLAGTCGVLLLSLVITLYCKRGRKKLLYIFKQPFMRPVQTTQEED
GCSCRFPEEEEGGCELRVKFSRSADAPAYQQGQNQLYNELNLGRREEYDVLDKRRGRDPEMGGKPR
RKNPQEGLYNELQKDKMAEAYSEIGMKGERRRGKGHDGLYQGLSTATKDTYDALHMQALPPR
VL5
MALPVTALLLPLALLLHAARPEVQLVESGGGLVQPGRSLRLSCTASGFTFTDYYMSWVRQAPGKGLE
WVGFIRSKADGYTTEYAASVKGRFTISRDDSKSIAYLQMNSLKTEDTAVYYCTRDAAYYSYYSPEGAMD
YWGQGTLVTVSSGGGGSGGGGSGGGGSMADYKDIQMTQSPSSVSASVGDRVTITCRASQNVDSAV
AWYQQKPGKAPKLLIYSASYRQSGVPSRFSGSGSGTDFTLTISSLQPEDFATYYCQQYYSTPWTFGQGT
KVEIKRGLAVSTISSFFPPGYQIYIWAPLAGTCGVLLLSLVITLYCKRGRKKLLYIFKQPFMRPVQTTQEED
GCSCRFPEEEEGGCELRVKFSRSADAPAYQQGQNQLYNELNLGRREEYDVLDKRRGRDPEMGGKPR
RKNPQEGLYNELQKDKMAEAYSEIGMKGERRRGKGHDGLYQGLSTATKDTYDALHMQALPPR
VL6
MALPVTALLLPLALLLHAARPEVQLVESGGGLVQPGRSLRLSCTASGFTFTDYYMSWVRQAPGKGLE
WVGFIRSKADGYTTEYAASVKGRFTISRDDSKSIAYLQMNSLKTEDTAVYYCTRDAAYYSYYSPEGAMD
YWGQGTLVTVSSGGGGSGGGGSGGGGSMADYKDIQMTQSPSSVSASVGDRVTITCRASQNVDSAV
AWYQQKPGKAPKLLIYSASYGQSGVPSRFSGSGSGTDFTLTISSLQPEDFATYYCQQYYSTPWTFGQG
TKVEIKRGLAVSTISSFFPPGYQIYIWAPLAGTCGVLLLSLVITLYCKRGRKKLLYIFKQPFMRPVQTTQEE
DGCSCRFPEEEEGGCELRVKFSRSADAPAYQQGQNQLYNELNLGRREEYDVLDKRRGRDPEMGGKP
RRKNPQEGLYNELQKDKMAEAYSEIGMKGERRRGKGHDGLYQGLSTATKDTYDALHMQALPPR
Version 3 VH1
VL1
MALPVTALLLPLALLLHAARPEVKLVESGGGLVQPGRSLRLSCTASGFTFTDYYMSWVRQAPGKGLE
WVGLIRSKADGYTTEYSASVKGRFTISRDDSKSILYLQMNSLKTEDTAVYYCARDAAYYSYYSPEGAM
DYWGQGTLVTVSSGGGGSGGGGSGGGGSMADYKDIVMTQSPSSVSASVGDRVTITCRASQNVDS
AVAWYQQKPGKAPKALIYSASYRYSGVPSRFSGRGSGTDFTLTISSLQPEDFATYYCQQYYSTPWTFG
QGTKVEIKRTTTPAPRPPTPAPTIASQPLSLRPEACRPAAGGAVHTRGLDFACDIYIWAPLAGTCGVLL
LSLVITLYCKRGRKKLLYIFKQPFMRPVQTTQEEDGCSCRFPEEEEGGCELRVKFSRSADAPAYQQGQ
NQLYNELNLGRREEYDVLDKRRGRDPEMGGKPRRKNPQEGLYNELQKDKMAEAYSEIGMKGERRR
GKGHDGLYQGLSTATKDTYDALHMQALPPR
VL2
MALPVTALLLPLALLLHAARPEVKLVESGGGLVQPGRSLRLSCTASGFTFTDYYMSWVRQAPGKGLE
WVGLIRSKADGYTTEYSASVKGRFTISRDDSKSILYLQMNSLKTEDTAVYYCARDAAYYSYYSPEGAM
DYWGQGTLVTVSSGGGGSGGGGSGGGGSMADYKDIQMTQSPSSVSASVGDRVTITCRASQNVDS
AVAWYQQKPGKAPKALIYSASYRYSGVPSRFSGRGSGTDFTLTISSLQPEDFATYYCQQYYSTPWTFG
QGTKVEIKRTTTPAPRPPTPAPTIASQPLSLRPEACRPAAGGAVHTRGLDFACDIYIWAPLAGTCGVLL
LSLVITLYCKRGRKKLLYIFKQPFMRPVQTTQEEDGCSCRFPEEEEGGCELRVKFSRSADAPAYQQGQ
NQLYNELNLGRREEYDVLDKRRGRDPEMGGKPRRKNPQEGLYNELQKDKMAEAYSEIGMKGERRR
GKGHDGLYQGLSTATKDTYDALHMQALPPR
VL3
MALPVTALLLPLALLLHAARPEVKLVESGGGLVQPGRSLRLSCTASGFTFTDYYMSWVRQAPGKGLE
WVGLIRSKADGYTTEYSASVKGRFTISRDDSKSILYLQMNSLKTEDTAVYYCARDAAYYSYYSPEGAM
DYWGQGTLVTVSSGGGGSGGGGSGGGGSMADYKDIQMTQSPSSVSASVGDRVTITCRASQNVDS
AVAWYQQKPGKAPKALIYSASYRYSGVPSRFSGSGSGTDFTLTISSLQPEDFATYYCQQYYSTPWTFG
QGTKVEIKRTTTPAPRPPTPAPTIASQPLSLRPEACRPAAGGAVHTRGLDFACDIYIWAPLAGTCGVLL
LSLVITLYCKRGRKKLLYIFKQPFMRPVQTTQEEDGCSCRFPEEEEGGCELRVKFSRSADAPAYQQGQ
NQLYNELNLGRREEYDVLDKRRGRDPEMGGKPRRKNPQEGLYNELQKDKMAEAYSEIGMKGERRR
GKGHDGLYQGLSTATKDTYDALHMQALPPR
VL4
MALPVTALLLPLALLLHAARPEVKLVESGGGLVQPGRSLRLSCTASGFTFTDYYMSWVRQAPGKGLE
WVGLIRSKADGYTTEYSASVKGRFTISRDDSKSILYLQMNSLKTEDTAVYYCARDAAYYSYYSPEGAM
DYWGQGTLVTVSSGGGGSGGGGSGGGGSMADYKDIQMTQSPSSVSASVGDRVTITCRASQNVDS
AVAWYQQKPGKAPKLLIYSASYRYSGVPSRFSGSGSGTDFTLTISSLQPEDFATYYCQQYYSTPWTFG
QGTKVEIKRTTTPAPRPPTPAPTIASQPLSLRPEACRPAAGGAVHTRGLDFACDIYIWAPLAGTCGVLL
LSLVITLYCKRGRKKLLYIFKQPFMRPVQTTQEEDGCSCRFPEEEEGGCELRVKFSRSADAPAYQQGQ
NQLYNELNLGRREEYDVLDKRRGRDPEMGGKPRRKNPQEGLYNELQKDKMAEAYSEIGMKGERRR
GKGHDGLYQGLSTATKDTYDALHMQALPPR
VL5
MALPVTALLLPLALLLHAARPEVKLVESGGGLVQPGRSLRLSCTASGFTFTDYYMSWVRQAPGKGLE
WVGLIRSKADGYTTEYSASVKGRFTISRDDSKSILYLQMNSLKTEDTAVYYCARDAAYYSYYSPEGAM
DYWGQGTLVTVSSGGGGSGGGGSGGGGSMADYKDIQMTQSPSSVSASVGDRVTITCRASQNVDS
AVAWYQQKPGKAPKLLIYSASYRQSGVPSRFSGSGSGTDFTLTISSLQPEDFATYYCQQYYSTPWTFG
QGTKVEIKRTTTPAPRPPTPAPTIASQPLSLRPEACRPAAGGAVHTRGLDFACDIYIWAPLAGTCGVLL
LSLVITLYCKRGRKKLLYIFKQPFMRPVQTTQEEDGCSCRFPEEEEGGCELRVKFSRSADAPAYQQGQ
NQLYNELNLGRREEYDVLDKRRGRDPEMGGKPRRKNPQEGLYNELQKDKMAEAYSEIGMKGERRR
GKGHDGLYQGLSTATKDTYDALHMQALPPR
VL6
MALPVTALLLPLALLLHAARPEVKLVESGGGLVQPGRSLRLSCTASGFTFTDYYMSWVRQAPGKGLE
WVGLIRSKADGYTTEYSASVKGRFTISRDDSKSILYLQMNSLKTEDTAVYYCARDAAYYSYYSPEGAM
DYWGQGTLVTVSSGGGGSGGGGSGGGGSMADYKDIQMTQSPSSVSASVGDRVTITCRASQNVDS
AVAWYQQKPGKAPKLLIYSASYGQSGVPSRFSGSGSGTDFTLTISSLQPEDFATYYCQQYYSTPWTFG
QGTKVEIKRTTTPAPRPPTPAPTIASQPLSLRPEACRPAAGGAVHTRGLDFACDIYIWAPLAGTCGVLL
LSLVITLYCKRGRKKLLYIFKQPFMRPVQTTQEEDGCSCRFPEEEEGGCELRVKFSRSADAPAYQQGQ
NQLYNELNLGRREEYDVLDKRRGRDPEMGGKPRRKNPQEGLYNELQKDKMAEAYSEIGMKGERRR
GKGHDGLYQGLSTATKDTYDALHMQALPPR
Version 3 VH2
VL1
MALPVTALLLPLALLLHAARPEVQLVESGGGLVQPGRSLRLSCTASGFTFTDYYMSWVRQAPGKGLE
WVGLIRSKADGYTTEYSASVKGRFTISRDDSKSILYLQMNSLKTEDTAVYYCARDAAYYSYYSPEGAM
DYWGQGTLVTVSSGGGGSGGGGSGGGGSMADYKDIVMTQSPSSVSASVGDRVTITCRASQNVDS
AVAWYQQKPGKAPKALIYSASYRYSGVPSRFSGRGSGTDFTLTISSLQPEDFATYYCQQYYSTPWTFG
QGTKVEIKRTTTPAPRPPTPAPTIASQPLSLRPEACRPAAGGAVHTRGLDFACDIYIWAPLAGTCGVLL
LSLVITLYCKRGRKKLLYIFKQPFMRPVQTTQEEDGCSCRFPEEEEGGCELRVKFSRSADAPAYQQGQ
NQLYNELNLGRREEYDVLDKRRGRDPEMGGKPRRKNPQEGLYNELQKDKMAEAYSEIGMKGERRR
GKGHDGLYQGLSTATKDTYDALHMQALPPR
VL2
MALPVTALLLPLALLLHAARPEVQLVESGGGLVQPGRSLRLSCTASGFTFTDYYMSWVRQAPGKGLE
WVGLIRSKADGYTTEYSASVKGRFTISRDDSKSILYLQMNSLKTEDTAVYYCARDAAYYSYYSPEGAM
DYWGQGTLVTVSSGGGGSGGGGSGGGGSMADYKDIQMTQSPSSVSASVGDRVTITCRASQNVDS
AVAWYQQKPGKAPKALIYSASYRYSGVPSRFSGRGSGTDFTLTISSLQPEDFATYYCQQYYSTPWTFG
QGTKVEIKRTTTPAPRPPTPAPTIASQPLSLRPEACRPAAGGAVHTRGLDFACDIYIWAPLAGTCGVLL
LSLVITLYCKRGRKKLLYIFKQPFMRPVQTTQEEDGCSCRFPEEEEGGCELRVKFSRSADAPAYQQGQ
NQLYNELNLGRREEYDVLDKRRGRDPEMGGKPRRKNPQEGLYNELQKDKMAEAYSEIGMKGERRR
GKGHDGLYQGLSTATKDTYDALHMQALPPR
VL3
MALPVTALLLPLALLLHAARPEVQLVESGGGLVQPGRSLRLSCTASGFTFTDYYMSWVRQAPGKGLE
WVGLIRSKADGYTTEYSASVKGRFTISRDDSKSILYLQMNSLKTEDTAVYYCARDAAYYSYYSPEGAM
DYWGQGTLVTVSSGGGGSGGGGSGGGGSMADYKDIQMTQSPSSVSASVGDRVTITCRASQNVDS
AVAWYQQKPGKAPKALIYSASYRYSGVPSRFSGSGSGTDFTLTISSLQPEDFATYYCQQYYSTPWTFG
QGTKVEIKRTTTPAPRPPTPAPTIASQPLSLRPEACRPAAGGAVHTRGLDFACDIYIWAPLAGTCGVLL
LSLVITLYCKRGRKKLLYIFKQPFMRPVQTTQEEDGCSCRFPEEEEGGCELRVKFSRSADAPAYQQGQ
NQLYNELNLGRREEYDVLDKRRGRDPEMGGKPRRKNPQEGLYNELQKDKMAEAYSEIGMKGERRR
GKGHDGLYQGLSTATKDTYDALHMQALPPR
VL4
MALPVTALLLPLALLLHAARPEVQLVESGGGLVQPGRSLRLSCTASGFTFTDYYMSWVRQAPGKGLE
WVGLIRSKADGYTTEYSASVKGRFTISRDDSKSILYLQMNSLKTEDTAVYYCARDAAYYSYYSPEGAM
DYWGQGTLVTVSSGGGGSGGGGSGGGGSMADYKDIQMTQSPSSVSASVGDRVTITCRASQNVDS
AVAWYQQKPGKAPKLLIYSASYRYSGVPSRFSGSGSGTDFTLTISSLQPEDFATYYCQQYYSTPWTFG
QGTKVEIKRTTTPAPRPPTPAPTIASQPLSLRPEACRPAAGGAVHTRGLDFACDIYIWAPLAGTCGVLL
LSLVITLYCKRGRKKLLYIFKQPFMRPVQTTQEEDGCSCRFPEEEEGGCELRVKFSRSADAPAYQQGQ
NQLYNELNLGRREEYDVLDKRRGRDPEMGGKPRRKNPQEGLYNELQKDKMAEAYSEIGMKGERRR
GKGHDGLYQGLSTATKDTYDALHMQALPPR
VL5
MALPVTALLLPLALLLHAARPEVQLVESGGGLVQPGRSLRLSCTASGFTFTDYYMSWVRQAPGKGLE
WVGLIRSKADGYTTEYSASVKGRFTISRDDSKSILYLQMNSLKTEDTAVYYCARDAAYYSYYSPEGAM
DYWGQGTLVTVSSGGGGSGGGGSGGGGSMADYKDIQMTQSPSSVSASVGDRVTITCRASQNVDS
AVAWYQQKPGKAPKLLIYSASYRQSGVPSRFSGSGSGTDFTLTISSLQPEDFATYYCQQYYSTPWTFG
QGTKVEIKRTTTPAPRPPTPAPTIASQPLSLRPEACRPAAGGAVHTRGLDFACDIYIWAPLAGTCGVLL
LSLVITLYCKRGRKKLLYIFKQPFMRPVQTTQEEDGCSCRFPEEEEGGCELRVKFSRSADAPAYQQGQ
NQLYNELNLGRREEYDVLDKRRGRDPEMGGKPRRKNPQEGLYNELQKDKMAEAYSEIGMKGERRR
GKGHDGLYQGLSTATKDTYDALHMQALPPR
VL6
MALPVTALLLPLALLLHAARPEVQLVESGGGLVQPGRSLRLSCTASGFTFTDYYMSWVRQAPGKGLE
WVGLIRSKADGYTTEYSASVKGRFTISRDDSKSILYLQMNSLKTEDTAVYYCARDAAYYSYYSPEGAM
DYWGQGTLVTVSSGGGGSGGGGSGGGGSMADYKDIQMTQSPSSVSASVGDRVTITCRASQNVDS
AVAWYQQKPGKAPKLLIYSASYGQSGVPSRFSGSGSGTDFTLTISSLQPEDFATYYCQQYYSTPWTFG
QGTKVEIKRTTTPAPRPPTPAPTIASQPLSLRPEACRPAAGGAVHTRGLDFACDIYIWAPLAGTCGVLL
LSLVITLYCKRGRKKLLYIFKQPFMRPVQTTQEEDGCSCRFPEEEEGGCELRVKFSRSADAPAYQQGQ
NQLYNELNLGRREEYDVLDKRRGRDPEMGGKPRRKNPQEGLYNELQKDKMAEAYSEIGMKGERRR
GKGHDGLYQGLSTATKDTYDALHMQALPPR
Version 3 VH3
VL1
MALPVTALLLPLALLLHAARPEVQLVESGGGLVQPGRSLRLSCTASGFTFTDYYMSWVRQAPGKGLE
WVGLIRSKADGYTTEYSASVKGRFTISRDDSKSIAYLQMNSLKTEDTAVYYCARDAAYYSYYSPEGAM
DYWGQGTLVTVSSGGGGSGGGGSGGGGSMADYKDIVMTQSPSSVSASVGDRVTITCRASQNVDS
AVAWYQQKPGKAPKALIYSASYRYSGVPSRFSGRGSGTDFTLTISSLQPEDFATYYCQQYYSTPWTFG
QGTKVEIKRTTTPAPRPPTPAPTIASQPLSLRPEACRPAAGGAVHTRGLDFACDIYIWAPLAGTCGVLL
LSLVITLYCKRGRKKLLYIFKQPFMRPVQTTQEEDGCSCRFPEEEEGGCELRVKFSRSADAPAYQQGQ
NQLYNELNLGRREEYDVLDKRRGRDPEMGGKPRRKNPQEGLYNELQKDKMAEAYSEIGMKGERRR
GKGHDGLYQGLSTATKDTYDALHMQALPPR
VL2
MALPVTALLLPLALLLHAARPEVQLVESGGGLVQPGRSLRLSCTASGFTFTDYYMSWVRQAPGKGLE
WVGLIRSKADGYTTEYSASVKGRFTISRDDSKSIAYLQMNSLKTEDTAVYYCARDAAYYSYYSPEGAM
DYWGQGTLVTVSSGGGGSGGGGSGGGGSMADYKDIQMTQSPSSVSASVGDRVTITCRASQNVDS
AVAWYQQKPGKAPKALIYSASYRYSGVPSRFSGRGSGTDFTLTISSLQPEDFATYYCQQYYSTPWTFG
QGTKVEIKRTTTPAPRPPTPAPTIASQPLSLRPEACRPAAGGAVHTRGLDFACDIYIWAPLAGTCGVLL
LSLVITLYCKRGRKKLLYIFKQPFMRPVQTTQEEDGCSCRFPEEEEGGCELRVKFSRSADAPAYQQGQ
NQLYNELNLGRREEYDVLDKRRGRDPEMGGKPRRKNPQEGLYNELQKDKMAEAYSEIGMKGERRR
GKGHDGLYQGLSTATKDTYDALHMQALPPR
VL3
MALPVTALLLPLALLLHAARPEVQLVESGGGLVQPGRSLRLSCTASGFTFTDYYMSWVRQAPGKGLE
WVGLIRSKADGYTTEYSASVKGRFTISRDDSKSIAYLQMNSLKTEDTAVYYCARDAAYYSYYSPEGAM
DYWGQGTLVTVSSGGGGSGGGGSGGGGSMADYKDIQMTQSPSSVSASVGDRVTITCRASQNVDS
AVAWYQQKPGKAPKALIYSASYRYSGVPSRFSGSGSGTDFTLTISSLQPEDFATYYCQQYYSTPWTFG
QGTKVEIKRTTTPAPRPPTPAPTIASQPLSLRPEACRPAAGGAVHTRGLDFACDIYIWAPLAGTCGVLL
LSLVITLYCKRGRKKLLYIFKQPFMRPVQTTQEEDGCSCRFPEEEEGGCELRVKFSRSADAPAYQQGQ
NQLYNELNLGRREEYDVLDKRRGRDPEMGGKPRRKNPQEGLYNELQKDKMAEAYSEIGMKGERRR
GKGHDGLYQGLSTATKDTYDALHMQALPPR
VL4
MALPVTALLLPLALLLHAARPEVQLVESGGGLVQPGRSLRLSCTASGFTFTDYYMSWVRQAPGKGLE
WVGLIRSKADGYTTEYSASVKGRFTISRDDSKSIAYLQMNSLKTEDTAVYYCARDAAYYSYYSPEGAM
DYWGQGTLVTVSSGGGGSGGGGSGGGGSMADYKDIQMTQSPSSVSASVGDRVTITCRASQNVDS
AVAWYQQKPGKAPKLLIYSASYRYSGVPSRFSGSGSGTDFTLTISSLQPEDFATYYCQQYYSTPWTFG
QGTKVEIKRTTTPAPRPPTPAPTIASQPLSLRPEACRPAAGGAVHTRGLDFACDIYIWAPLAGTCGVLL
LSLVITLYCKRGRKKLLYIFKQPFMRPVQTTQEEDGCSCRFPEEEEGGCELRVKFSRSADAPAYQQGQ
NQLYNELNLGRREEYDVLDKRRGRDPEMGGKPRRKNPQEGLYNELQKDKMAEAYSEIGMKGERRR
GKGHDGLYQGLSTATKDTYDALHMQALPPR
VL5
MALPVTALLLPLALLLHAARPEVQLVESGGGLVQPGRSLRLSCTASGFTFTDYYMSWVRQAPGKGLE
WVGLIRSKADGYTTEYSASVKGRFTISRDDSKSIAYLQMNSLKTEDTAVYYCARDAAYYSYYSPEGAM
DYWGQGTLVTVSSGGGGSGGGGSGGGGSMADYKDIQMTQSPSSVSASVGDRVTITCRASQNVDS
AVAWYQQKPGKAPKLLIYSASYRQSGVPSRFSGSGSGTDFTLTISSLQPEDFATYYCQQYYSTPWTFG
QGTKVEIKRTTTPAPRPPTPAPTIASQPLSLRPEACRPAAGGAVHTRGLDFACDIYIWAPLAGTCGVLL
LSLVITLYCKRGRKKLLYIFKQPFMRPVQTTQEEDGCSCRFPEEEEGGCELRVKFSRSADAPAYQQGQ
NQLYNELNLGRREEYDVLDKRRGRDPEMGGKPRRKNPQEGLYNELQKDKMAEAYSEIGMKGERRR
GKGHDGLYQGLSTATKDTYDALHMQALPPR
VL6
MALPVTALLLPLALLLHAARPEVQLVESGGGLVQPGRSLRLSCTASGFTFTDYYMSWVRQAPGKGLE
WVGLIRSKADGYTTEYSASVKGRFTISRDDSKSIAYLQMNSLKTEDTAVYYCARDAAYYSYYSPEGAM
DYWGQGTLVTVSSGGGGSGGGGSGGGGSMADYKDIQMTQSPSSVSASVGDRVTITCRASQNVDS
AVAWYQQKPGKAPKLLIYSASYGQSGVPSRFSGSGSGTDFTLTISSLQPEDFATYYCQQYYSTPWTFG
QGTKVEIKRTTTPAPRPPTPAPTIASQPLSLRPEACRPAAGGAVHTRGLDFACDIYIWAPLAGTCGVLL
LSLVITLYCKRGRKKLLYIFKQPFMRPVQTTQEEDGCSCRFPEEEEGGCELRVKFSRSADAPAYQQGQ
NQLYNELNLGRREEYDVLDKRRGRDPEMGGKPRRKNPQEGLYNELQKDKMAEAYSEIGMKGERRR
GKGHDGLYQGLSTATKDTYDALHMQALPPR
Version 3 VH4
VL1
MALPVTALLLPLALLLHAARPEVQLVESGGGLVQPGRSLRLSCTASGFTFTDYYMSWVRQAPGKGLE
WVGFIRSKADGYTTEYSASVKGRFTISRDDSKSIAYLQMNSLKTEDTAVYYCARDAAYYSYYSPEGAM
DYWGQGTLVTVSSGGGGSGGGGSGGGGSMADYKDIVMTQSPSSVSASVGDRVTITCRASQNVDS
AVAWYQQKPGKAPKALIYSASYRYSGVPSRFSGRGSGTDFTLTISSLQPEDFATYYCQQYYSTPWTFG
QGTKVEIKRTTTPAPRPPTPAPTIASQPLSLRPEACRPAAGGAVHTRGLDFACDIYIWAPLAGTCGVLL
LSLVITLYCKRGRKKLLYIFKQPFMRPVQTTQEEDGCSCRFPEEEEGGCELRVKFSRSADAPAYQQGQ
NQLYNELNLGRREEYDVLDKRRGRDPEMGGKPRRKNPQEGLYNELQKDKMAEAYSEIGMKGERRR
GKGHDGLYQGLSTATKDTYDALHMQALPPR
VL2
MALPVTALLLPLALLLHAARPEVQLVESGGGLVQPGRSLRLSCTASGFTFTDYYMSWVRQAPGKGLE
WVGFIRSKADGYTTEYSASVKGRFTISRDDSKSIAYLQMNSLKTEDTAVYYCARDAAYYSYYSPEGAM
DYWGQGTLVTVSSGGGGSGGGGSGGGGSMADYKDIQMTQSPSSVSASVGDRVTITCRASQNVDS
AVAWYQQKPGKAPKALIYSASYRYSGVPSRFSGRGSGTDFTLTISSLQPEDFATYYCQQYYSTPWTFG
QGTKVEIKRTTTPAPRPPTPAPTIASQPLSLRPEACRPAAGGAVHTRGLDFACDIYIWAPLAGTCGVLL
LSLVITLYCKRGRKKLLYIFKQPFMRPVQTTQEEDGCSCRFPEEEEGGCELRVKFSRSADAPAYQQGQ
NQLYNELNLGRREEYDVLDKRRGRDPEMGGKPRRKNPQEGLYNELQKDKMAEAYSEIGMKGERRR
GKGHDGLYQGLSTATKDTYDALHMQALPPR
VL3
MALPVTALLLPLALLLHAARPEVQLVESGGGLVQPGRSLRLSCTASGFTFTDYYMSWVRQAPGKGLE
WVGFIRSKADGYTTEYSASVKGRFTISRDDSKSIAYLQMNSLKTEDTAVYYCARDAAYYSYYSPEGAM
DYWGQGTLVTVSSGGGGSGGGGSGGGGSMADYKDIQMTQSPSSVSASVGDRVTITCRASQNVDS
AVAWYQQKPGKAPKALIYSASYRYSGVPSRFSGSGSGTDFTLTISSLQPEDFATYYCQQYYSTPWTFG
QGTKVEIKRTTTPAPRPPTPAPTIASQPLSLRPEACRPAAGGAVHTRGLDFACDIYIWAPLAGTCGVLL
LSLVITLYCKRGRKKLLYIFKQPFMRPVQTTQEEDGCSCRFPEEEEGGCELRVKFSRSADAPAYQQGQ
NQLYNELNLGRREEYDVLDKRRGRDPEMGGKPRRKNPQEGLYNELQKDKMAEAYSEIGMKGERRR
GKGHDGLYQGLSTATKDTYDALHMQALPPR
VL4
MALPVTALLLPLALLLHAARPEVQLVESGGGLVQPGRSLRLSCTASGFTFTDYYMSWVRQAPGKGLE
WVGFIRSKADGYTTEYSASVKGRFTISRDDSKSIAYLQMNSLKTEDTAVYYCARDAAYYSYYSPEGAM
DYWGQGTLVTVSSGGGGSGGGGSGGGGSMADYKDIQMTQSPSSVSASVGDRVTITCRASQNVDS
AVAWYQQKPGKAPKLLIYSASYRYSGVPSRFSGSGSGTDFTLTISSLQPEDFATYYCQQYYSTPWTFG
QGTKVEIKRTTTPAPRPPTPAPTIASQPLSLRPEACRPAAGGAVHTRGLDFACDIYIWAPLAGTCGVLL
LSLVITLYCKRGRKKLLYIFKQPFMRPVQTTQEEDGCSCRFPEEEEGGCELRVKFSRSADAPAYQQGQ
NQLYNELNLGRREEYDVLDKRRGRDPEMGGKPRRKNPQEGLYNELQKDKMAEAYSEIGMKGERRR
GKGHDGLYQGLSTATKDTYDALHMQALPPR
VL5
MALPVTALLLPLALLLHAARPEVQLVESGGGLVQPGRSLRLSCTASGFTFTDYYMSWVRQAPGKGLE
WVGFIRSKADGYTTEYSASVKGRFTISRDDSKSIAYLQMNSLKTEDTAVYYCARDAAYYSYYSPEGAM
DYWGQGTLVTVSSGGGGSGGGGSGGGGSMADYKDIQMTQSPSSVSASVGDRVTITCRASQNVDS
AVAWYQQKPGKAPKLLIYSASYRQSGVPSRFSGSGSGTDFTLTISSLQPEDFATYYCQQYYSTPWTFG
QGTKVEIKRTTTPAPRPPTPAPTIASQPLSLRPEACRPAAGGAVHTRGLDFACDIYIWAPLAGTCGVL
LLSLVITLYCKRGRKKLLYIFKQPFMRPVQTTQEEDGCSCRFPEEEEGGCELRVKFSRSADAPAYQQG
QNQLYNELNLGRREEYDVLDKRRGRDPEMGGKPRRKNPQEGLYNELQKDKMAEAYSEIGMKGER
RRGKGHDGLYQGLSTATKDTYDALHMQALPPR
VL6
MALPVTALLLPLALLLHAARPEVQLVESGGGLVQPGRSLRLSCTASGFTFTDYYMSWVRQAPGKGLE
WVGFIRSKADGYTTEYSASVKGRFTISRDDSKSIAYLQMNSLKTEDTAVYYCARDAAYYSYYSPEGAM
DYWGQGTLVTVSSGGGGSGGGGSGGGGSMADYKDIQMTQSPSSVSASVGDRVTITCRASQNVDS
AVAWYQQKPGKAPKLLIYSASYGQSGVPSRFSGSGSGTDFTLTISSLQPEDFATYYCQQYYSTPWTF
GQGTKVEIKRTTTPAPRPPTPAPTIASQPLSLRPEACRPAAGGAVHTRGLDFACDIYIWAPLAGTCGV
LLLSLVITLYCKRGRKKLLYIFKQPFMRPVQTTQEEDGCSCRFPEEEEGGCELRVKFSRSADAPAYQQG
QNQLYNELNLGRREEYDVLDKRRGRDPEMGGKPRRKNPQEGLYNELQKDKMAEAYSEIGMKGER
RRGKGHDGLYQGLSTATKDTYDALHMQALPPR
VH5
Version 3 VH5
VL1
MALPVTALLLPLALLLHAARPEVQLVESGGGLVQPGRSLRLSCTASGFTFTDYYMSWVRQAPGKGLE
WVGFIRSKADGYTTEYAASVKGRFTISRDDSKSIAYLQMNSLKTEDTAVYYCARDAAYYSYYSPEGA
MDYWGQGTLVTVSSGGGGSGGGGSGGGGSMADYKDIVMTQSPSSVSASVGDRVTITCRASQNV
DSAVAWYQQKPGKAPKALIYSASYRYSGVPSRFSGRGSGTDFTLTISSLQPEDFATYYCQQYYSTPWT
FGQGTKVEIKRTTTPAPRPPTPAPTIASQPLSLRPEACRPAAGGAVHTRGLDFACDIYIWAPLAGTCG
VLLLSLVITLYCKRGRKKLLYIFKQPFMRPVQTTQEEDGCSCRFPEEEEGGCELRVKFSRSADAPAYQQ
GQNQLYNELNLGRREEYDVLDKRRGRDPEMGGKPRRKNPQEGLYNELQKDKMAEAYSEIGMKGE
RRRGKGHDGLYQGLSTATKDTYDALHMQALPPR
VL2
MALPVTALLLPLALLLHAARPEVQLVESGGGLVQPGRSLRLSCTASGFTFTDYYMSWVRQAPGKGLE
WVGFIRSKADGYTTEYAASVKGRFTISRDDSKSIAYLQMNSLKTEDTAVYYCARDAAYYSYYSPEGAM
DYWGQGTLVTVSSGGGGSGGGGSGGGGSMADYKDIQMTQSPSSVSASVGDRVTITCRASQNVDSA
VAWYQQKPGKAPKALIYSASYRYSGVPSRFSGRGSGTDFTLTISSLQPEDFATYYCQQYYSTPWTFGQ
GTKVEIKRTTTPAPRPPTPAPTIASQPLSLRPEACRPAAGGAVHTRGLDFACDIYIWAPLAGTCGVLLLS
LVITLYCKRGRKKLLYIFKQPFMRPVQTTQEEDGCSCRFPEEEEGGCELRVKFSRSADAPAYQQGQNQL
YNELNLGRREEYDVLDKRRGRDPEMGGKPRRKNPQEGLYNELQKDKMAEAYSEIGMKGERRRGKGH
DGLYQGLSTATKDTYDALHMQALPPR
VL3
MALPVTALLLPLALLLHAARPEVQLVESGGGLVQPGRSLRLSCTASGFTFTDYYMSWVRQAPGKGLE
WVGFIRSKADGYTTEYAASVKGRFTISRDDSKSIAYLQMNSLKTEDTAVYYCARDAAYYSYYSPEGAM
DYWGQGTLVTVSSGGGGSGGGGSGGGGSMADYKDIQMTQSPSSVSASVGDRVTITCRASQNVDSA
VAWYQQKPGKAPKALIYSASYRYSGVPSRFSGSGSGTDFTLTISSLQPEDFATYYCQQYYSTPWTFGQG
TKVEIKRTTTPAPRPPTPAPTIASQPLSLRPEACRPAAGGAVHTRGLDFACDIYIWAPLAGTCGVLLLSLV
ITLYCKRGRKKLLYIFKQPFMRPVQTTQEEDGCSCRFPEEEEGGCELRVKFSRSADAPAYQQGQNQLY
NELNLGRREEYDVLDKRRGRDPEMGGKPRRKNPQEGLYNELQKDKMAEAYSEIGMKGERRRGKGH
DGLYQGLSTATKDTYDALHMQALPPR
VL4
MALPVTALLLPLALLLHAARPEVQLVESGGGLVQPGRSLRLSCTASGFTFTDYYMSWVRQAPGKGLE
WVGFIRSKADGYTTEYAASVKGRFTISRDDSKSIAYLQMNSLKTEDTAVYYCARDAAYYSYYSPEGAM
DYWGQGTLVTVSSGGGGSGGGGSGGGGSMADYKDIQMTQSPSSVSASVGDRVTITCRASQNVDSA
VAWYQQKPGKAPKLLIYSASYRYSGVPSRFSGSGSGTDFTLTISSLQPEDFATYYCQQYYSTPWTFGQG
TKVEIKRTTTPAPRPPTPAPTIASQPLSLRPEACRPAAGGAVHTRGLDFACDIYIWAPLAGTCGVLLLSLV
ITLYCKRGRKKLLYIFKQPFMRPVQTTQEEDGCSCRFPEEEEGGCELRVKFSRSADAPAYQQGQNQLY
NELNLGRREEYDVLDKRRGRDPEMGGKPRRKNPQEGLYNELQKDKMAEAYSEIGMKGERRRGKGH
DGLYQGLSTATKDTYDALHMQALPPR
VL5
MALPVTALLLPLALLLHAARPEVQLVESGGGLVQPGRSLRLSCTASGFTFTDYYMSWVRQAPGKGLE
WVGFIRSKADGYTTEYAASVKGRFTISRDDSKSIAYLQMNSLKTEDTAVYYCARDAAYYSYYSPEGAM
DYWGQGTLVTVSSGGGGSGGGGSGGGGSMADYKDIQMTQSPSSVSASVGDRVTITCRASQNVDSA
VAWYQQKPGKAPKLLIYSASYRQSGVPSRFSGSGSGTDFTLTISSLQPEDFATYYCQQYYSTPWTFGQ
GTKVEIKRTTTPAPRPPTPAPTIASQPLSLRPEACRPAAGGAVHTRGLDFACDIYIWAPLAGTCGVLLLS
LVITLYCKRGRKKLLYIFKQPFMRPVQTTQEEDGCSCRFPEEEEGGCELRVKFSRSADAPAYQQGQNQL
YNELNLGRREEYDVLDKRRGRDPEMGGKPRRKNPQEGLYNELQKDKMAEAYSEIGMKGERRRGKGH
DGLYQGLSTATKDTYDALHMQALPPR
VL6
MALPVTALLLPLALLLHAARPEVQLVESGGGLVQPGRSLRLSCTASGFTFTDYYMSWVRQAPGKGLE
WVGFIRSKADGYTTEYAASVKGRFTISRDDSKSIAYLQMNSLKTEDTAVYYCARDAAYYSYYSPEGAM
DYWGQGTLVTVSSGGGGSGGGGSGGGGSMADYKDIQMTQSPSSVSASVGDRVTITCRASQNVDSA
VAWYQQKPGKAPKLLIYSASYGQSGVPSRFSGSGSGTDFTLTISSLQPEDFATYYCQQYYSTPWTFGQ
GTKVEIKRTTTPAPRPPTPAPTIASQPLSLRPEACRPAAGGAVHTRGLDFACDIYIWAPLAGTCGVLLLS
LVITLYCKRGRKKLLYIFKQPFMRPVQTTQEEDGCSCRFPEEEEGGCELRVKFSRSADAPAYQQGQNQL
YNELNLGRREEYDVLDKRRGRDPEMGGKPRRKNPQEGLYNELQKDKMAEAYSEIGMKGERRRGKGH
DGLYQGLSTATKDTYDALHMQALPPR
Version 3 VH6
VL1
MALPVTALLLPLALLLHAARPEVQLVESGGGLVQPGRSLRLSCTASGFTFTDYYMSWVRQAPGKGLE
WVGLIRSKADGYTTEYAASVKGRFTISRDDSKSIAYLQMNSLKTEDTAVYYCARDAAYYSYYSPEGAM
DYWGQGTLVTVSSGGGGSGGGGSGGGGSMADYKDIVMTQSPSSVSASVGDRVTITCRASQNVDSA
VAWYQQKPGKAPKALIYSASYRYSGVPSRFSGRGSGTDFTLTISSLQPEDFATYYCQQYYSTPWTFGQ
GTKVEIKRTTTPAPRPPTPAPTIASQPLSLRPEACRPAAGGAVHTRGLDFACDIYIWAPLAGTCGVLLLS
LVITLYCKRGRKKLLYIFKQPFMRPVQTTQEEDGCSCRFPEEEEGGCELRVKFSRSADAPAYQQGQNQL
YNELNLGRREEYDVLDKRRGRDPEMGGKPRRKNPQEGLYNELQKDKMAEAYSEIGMKGERRRGKGH
DGLYQGLSTATKDTYDALHMQALPPR
VL2
MALPVTALLLPLALLLHAARPEVQLVESGGGLVQPGRSLRLSCTASGFTFTDYYMSWVRQAPGKGLE
WVGLIRSKADGYTTEYAASVKGRFTISRDDSKSIAYLQMNSLKTEDTAVYYCARDAAYYSYYSPEGAM
DYWGQGTLVTVSSGGGGSGGGGSGGGGSMADYKDIQMTQSPSSVSASVGDRVTITCRASQNVDSA
VAWYQQKPGKAPKALIYSASYRYSGVPSRFSGRGSGTDFTLTISSLQPEDFATYYCQQYYSTPWTFGQ
GTKVEIKRTTTPAPRPPTPAPTIASQPLSLRPEACRPAAGGAVHTRGLDFACDIYIWAPLAGTCGVLLLS
LVITLYCKRGRKKLLYIFKQPFMRPVQTTQEEDGCSCRFPEEEEGGCELRVKFSRSADAPAYQQGQNQL
YNELNLGRREEYDVLDKRRGRDPEMGGKPRRKNPQEGLYNELQKDKMAEAYSEIGMKGERRRGKGH
DGLYQGLSTATKDTYDALHMQALPPR
VL3
MALPVTALLLPLALLLHAARPEVQLVESGGGLVQPGRSLRLSCTASGFTFTDYYMSWVRQAPGKGLE
WVGLIRSKADGYTTEYAASVKGRFTISRDDSKSIAYLQMNSLKTEDTAVYYCARDAAYYSYYSPEGAM
DYWGQGTLVTVSSGGGGSGGGGSGGGGSMADYKDIQMTQSPSSVSASVGDRVTITCRASQNVDSA
VAWYQQKPGKAPKALIYSASYRYSGVPSRFSGSGSGTDFTLTISSLQPEDFATYYCQQYYSTPWTFGQG
TKVEIKRTTTPAPRPPTPAPTIASQPLSLRPEACRPAAGGAVHTRGLDFACDIYIWAPLAGTCGVLLLSLV
ITLYCKRGRKKLLYIFKQPFMRPVQTTQEEDGCSCRFPEEEEGGCELRVKFSRSADAPAYQQGQNQLY
NELNLGRREEYDVLDKRRGRDPEMGGKPRRKNPQEGLYNELQKDKMAEAYSEIGMKGERRRGKGH
DGLYQGLSTATKDTYDALHMQALPPR
VL4
MALPVTALLLPLALLLHAARPEVQLVESGGGLVQPGRSLRLSCTASGFTFTDYYMSWVRQAPGKGLE
WVGLIRSKADGYTTEYAASVKGRFTISRDDSKSIAYLQMNSLKTEDTAVYYCARDAAYYSYYSPEGAM
DYWGQGTLVTVSSGGGGSGGGGSGGGGSMADYKDIQMTQSPSSVSASVGDRVTITCRASQNVDSA
VAWYQQKPGKAPKLLIYSASYRYSGVPSRFSGSGSGTDFTLTISSLQPEDFATYYCQQYYSTPWTFGQG
TKVEIKRTTTPAPRPPTPAPTIASQPLSLRPEACRPAAGGAVHTRGLDFACDIYIWAPLAGTCGVLLLSLV
ITLYCKRGRKKLLYIFKQPFMRPVQTTQEEDGCSCRFPEEEEGGCELRVKFSRSADAPAYQQGQNQLY
NELNLGRREEYDVLDKRRGRDPEMGGKPRRKNPQEGLYNELQKDKMAEAYSEIGMKGERRRGKGH
DGLYQGLSTATKDTYDALHMQALPPR
VL5
MALPVTALLLPLALLLHAARPEVQLVESGGGLVQPGRSLRLSCTASGFTFTDYYMSWVRQAPGKGLE
WVGLIRSKADGYTTEYAASVKGRFTISRDDSKSIAYLQMNSLKTEDTAVYYCARDAAYYSYYSPEGAM
DYWGQGTLVTVSSGGGGSGGGGSGGGGSMADYKDIQMTQSPSSVSASVGDRVTITCRASQNVDSA
VAWYQQKPGKAPKLLIYSASYRQSGVPSRFSGSGSGTDFTLTISSLQPEDFATYYCQQYYSTPWTFGQ
GTKVEIKRTTTPAPRPPTPAPTIASQPLSLRPEACRPAAGGAVHTRGLDFACDIYIWAPLAGTCGVLLLS
LVITLYCKRGRKKLLYIFKQPFMRPVQTTQEEDGCSCRFPEEEEGGCELRVKFSRSADAPAYQQGQNQL
YNELNLGRREEYDVLDKRRGRDPEMGGKPRRKNPQEGLYNELQKDKMAEAYSEIGMKGERRRGKGH
DGLYQGLSTATKDTYDALHMQALPPR
VL6
MALPVTALLLPLALLLHAARPEVQLVESGGGLVQPGRSLRLSCTASGFTFTDYYMSWVRQAPGKGLE
WVGLIRSKADGYTTEYAASVKGRFTISRDDSKSIAYLQMNSLKTEDTAVYYCARDAAYYSYYSPEGAM
DYWGQGTLVTVSSGGGGSGGGGSGGGGSMADYKDIQMTQSPSSVSASVGDRVTITCRASQNVDSA
VAWYQQKPGKAPKLLIYSASYGQSGVPSRFSGSGSGTDFTLTISSLQPEDFATYYCQQYYSTPWTFGQ
GTKVEIKRTTTPAPRPPTPAPTIASQPLSLRPEACRPAAGGAVHTRGLDFACDIYIWAPLAGTCGVLLLS
LVITLYCKRGRKKLLYIFKQPFMRPVQTTQEEDGCSCRFPEEEEGGCELRVKFSRSADAPAYQQGQNQL
YNELNLGRREEYDVLDKRRGRDPEMGGKPRRKNPQEGLYNELQKDKMAEAYSEIGMKGERRRGKGH
DGLYQGLSTATKDTYDALHMQALPPR
VH7
Version 3 VH7
VL1
MALPVTALLLPLALLLHAARPEVQLVESGGGLVQPGRSLRLSCTASGFTFTDYYMSWVRQAPGKGLE
WVGFIRSKADGYTTEYAASVKGRFTISRDDSKSIAYLQMNSLKTEDTAVYYCTRDAAYYSYYSPEGAMD
YWGQGTLVTVSSGGGGSGGGGSGGGGSMADYKDIVMTQSPSSVSASVGDRVTITCRASQNVDSAV
AWYQQKPGKAPKALIYSASYRYSGVPSRFSGRGSGTDFTLTISSLQPEDFATYYCQQYYSTPWTFGQGT
KVEIKRTTTPAPRPPTPAPTIASQPLSLRPEACRPAAGGAVHTRGLDFACDIYIWAPLAGTCGVLLLSLVI
TLYCKRGRKKLLYIFKQPFMRPVQTTQEEDGCSCRFPEEEEGGCELRVKFSRSADAPAYQQGQNQLYN
ELNLGRREEYDVLDKRRGRDPEMGGKPRRKNPQEGLYNELQKDKMAEAYSEIGMKGERRRGKGHD
GLYQGLSTATKDTYDALHMQALPPR
VL2
MALPVTALLLPLALLLHAARPEVQLVESGGGLVQPGRSLRLSCTASGFTFTDYYMSWVRQAPGKGLE
WVGFIRSKADGYTTEYAASVKGRFTISRDDSKSIAYLQMNSLKTEDTAVYYCTRDAAYYSYYSPEGAMD
YWGQGTLVTVSSGGGGSGGGGSGGGGSMADYKDIQMTQSPSSVSASVGDRVTITCRASQNVDSAV
AWYQQKPGKAPKALIYSASYRYSGVPSRFSGRGSGTDFTLTISSLQPEDFATYYCQQYYSTPWTFGQGT
KVEIKRTTTPAPRPPTPAPTIASQPLSLRPEACRPAAGGAVHTRGLDFACDIYIWAPLAGTCGVLLLSLVI
TLYCKRGRKKLLYIFKQPFMRPVQTTQEEDGCSCRFPEEEEGGCELRVKFSRSADAPAYQQGQNQLYN
ELNLGRREEYDVLDKRRGRDPEMGGKPRRKNPQEGLYNELQKDKMAEAYSEIGMKGERRRGKGHD
GLYQGLSTATKDTYDALHMQALPPR
VL3
MALPVTALLLPLALLLHAARPEVQLVESGGGLVQPGRSLRLSCTASGFTFTDYYMSWVRQAPGKGLE
WVGFIRSKADGYTTEYAASVKGRFTISRDDSKSIAYLQMNSLKTEDTAVYYCTRDAAYYSYYSPEGAMD
YWGQGTLVTVSSGGGGSGGGGSGGGGSMADYKDIQMTQSPSSVSASVGDRVTITCRASQNVDSAV
AWYQQKPGKAPKALIYSASYRYSGVPSRFSGSGSGTDFTLTISSLQPEDFATYYCQQYYSTPWTFGQGT
KVEIKRTTTPAPRPPTPAPTIASQPLSLRPEACRPAAGGAVHTRGLDFACDIYIWAPLAGTCGVLLLSLVI
TLYCKRGRKKLLYIFKQPFMRPVQTTQEEDGCSCRFPEEEEGGCELRVKFSRSADAPAYQQGQNQLYN
ELNLGRREEYDVLDKRRGRDPEMGGKPRRKNPQEGLYNELQKDKMAEAYSEIGMKGERRRGKGHD
GLYQGLSTATKDTYDALHMQALPPR
VL4
MALPVTALLLPLALLLHAARPEVQLVESGGGLVQPGRSLRLSCTASGFTFTDYYMSWVRQAPGKGLE
WVGFIRSKADGYTTEYAASVKGRFTISRDDSKSIAYLQMNSLKTEDTAVYYCTRDAAYYSYYSPEGAMD
YWGQGTLVTVSSGGGGSGGGGSGGGGSMADYKDIQMTQSPSSVSASVGDRVTITCRASQNVDSAV
AWYQQKPGKAPKLLIYSASYRYSGVPSRFSGSGSGTDFTLTISSLQPEDFATYYCQQYYSTPWTFGQGT
KVEIKRTTTPAPRPPTPAPTIASQPLSLRPEACRPAAGGAVHTRGLDFACDIYIWAPLAGTCGVLLLSLVI
TLYCKRGRKKLLYIFKQPFMRPVQTTQEEDGCSCRFPEEEEGGCELRVKFSRSADAPAYQQGQNQLYN
ELNLGRREEYDVLDKRRGRDPEMGGKPRRKNPQEGLYNELQKDKMAEAYSEIGMKGERRRGKGHD
GLYQGLSTATKDTYDALHMQALPPR
VL5
MALPVTALLLPLALLLHAARPEVQLVESGGGLVQPGRSLRLSCTASGFTFTDYYMSWVRQAPGKGLE
WVGFIRSKADGYTTEYAASVKGRFTISRDDSKSIAYLQMNSLKTEDTAVYYCTRDAAYYSYYSPEGAMD
YWGQGTLVTVSSGGGGSGGGGSGGGGSMADYKDIQMTQSPSSVSASVGDRVTITCRASQNVDSAV
AWYQQKPGKAPKLLIYSASYRQSGVPSRFSGSGSGTDFTLTISSLQPEDFATYYCQQYYSTPWTFGQGT
KVEIKRTTTPAPRPPTPAPTIASQPLSLRPEACRPAAGGAVHTRGLDFACDIYIWAPLAGTCGVLLLSLVI
TLYCKRGRKKLLYIFKQPFMRPVQTTQEEDGCSCRFPEEEEGGCELRVKFSRSADAPAYQQGQNQLYN
ELNLGRREEYDVLDKRRGRDPEMGGKPRRKNPQEGLYNELQKDKMAEAYSEIGMKGERRRGKGHD
GLYQGLSTATKDTYDALHMQALPPR
VL6
MALPVTALLLPLALLLHAARPEVQLVESGGGLVQPGRSLRLSCTASGFTFTDYYMSWVRQAPGKGLE
WVGFIRSKADGYTTEYAASVKGRFTISRDDSKSIAYLQMNSLKTEDTAVYYCTRDAAYYSYYSPEGAMD
YWGQGTLVTVSSGGGGSGGGGSGGGGSMADYKDIQMTQSPSSVSASVGDRVTITCRASQNVDSAV
AWYQQKPGKAPKLLIYSASYGQSGVPSRFSGSGSGTDFTLTISSLQPEDFATYYCQQYYSTPWTFGQG
TKVEIKRTTTPAPRPPTPAPTIASQPLSLRPEACRPAAGGAVHTRGLDFACDIYIWAPLAGTCGVLLLSLV
ITLYCKRGRKKLLYIFKQPFMRPVQTTQEEDGCSCRFPEEEEGGCELRVKFSRSADAPAYQQGQNQLY
NELNLGRREEYDVLDKRRGRDPEMGGKPRRKNPQEGLYNELQKDKMAEAYSEIGMKGERRRGKGH
DGLYQGLSTATKDTYDALHMQALPPR
Version 5 VH1
VL1
MALPVTALLLPLALLLHAARPEVKLVESGGGLVQPGRSLRLSCTASGFTFTDYYMSWVRQAPGKGLE
WVGLIRSKADGYTTEYSASVKGRFTISRDDSKSILYLQMNSLKTEDTAVYYCARDAAYYSYYSPEGAMD
YWGQGTLVTVSSGGGGSGGGGSGGGGSMADYKDIVMTQSPSSVSASVGDRVTITCRASQNVDSAV
AWYQQKPGKAPKALIYSASYRYSGVPSRFSGRGSGTDFTLTISSLQPEDFATYYCQQYYSTPWTFGQGT
KVEIKREPKSPDKTHTCPPCPAPPVAGPSVFLFPPKPKDTLMIARTPEVTCVVVDVSHEDPEVKFNWYV
DGVEVHNAKTKPREEQYNSTYRVVSVLTVLHQDWLNGKEYKCKVSNKALPAPIEKTISKAKGQPREPQ
VYTLPPSRDELTKNQVSLTCLVKGFYPSDIAVEWESNGQPENNYKTTPPVLDSDGSFFLYSKLTVDKSR
WQQGNVFSCSVMHEALHNHYTQKSLSLSPGKIYIWAPLAGTCGVLLLSLVITLYC
VL2
MALPVTALLLPLALLLHAARPEVKLVESGGGLVQPGRSLRLSCTASGFTFTDYYMSWVRQAPGKGLE
WVGLIRSKADGYTTEYSASVKGRFTISRDDSKSILYLQMNSLKTEDTAVYYCARDAAYYSYYSPEGAMD
YWGQGTLVTVSSGGGGSGGGGSGGGGSMADYKDIQMTQSPSSVSASVGDRVTITCRASQNVDSAV
AWYQQKPGKAPKALIYSASYRYSGVPSRFSGRGSGTDFTLTISSLQPEDFATYYCQQYYSTPWTFGQGT
KVEIKREPKSPDKTHTCPPCPAPPVAGPSVFLFPPKPKDTLMIARTPEVTCVVVDVSHEDPEVKFNWYV
DGVEVHNAKTKPREEQYNSTYRVVSVLTVLHQDWLNGKEYKCKVSNKALPAPIEKTISKAKGQPREPQ
VYTLPPSRDELTKNQVSLTCLVKGFYPSDIAVEWESNGQPENNYKTTPPVLDSDGSFFLYSKLTVDKSR
WQQGNVFSCSVMHEALHNHYTQKSLSLSPGKIYIWAPLAGTCGVLLLSLVITLYC
VL3
MALPVTALLLPLALLLHAARPEVKLVESGGGLVQPGRSLRLSCTASGFTFTDYYMSWVRQAPGKGLE
WVGLIRSKADGYTTEYSASVKGRFTISRDDSKSILYLQMNSLKTEDTAVYYCARDAAYYSYYSPEGAMD
YWGQGTLVTVSSGGGGSGGGGSGGGGSMADYKDIQMTQSPSSVSASVGDRVTITCRASQNVDSAV
AWYQQKPGKAPKALIYSASYRYSGVPSRFSGSGSGTDFTLTISSLQPEDFATYYCQQYYSTPWTFGQGT
KVEIKREPKSPDKTHTCPPCPAPPVAGPSVFLFPPKPKDTLMIARTPEVTCVVVDVSHEDPEVKFNWYV
DGVEVHNAKTKPREEQYNSTYRVVSVLTVLHQDWLNGKEYKCKVSNKALPAPIEKTISKAKGQPREPQ
VYTLPPSRDELTKNQVSLTCLVKGFYPSDIAVEWESNGQPENNYKTTPPVLDSDGSFFLYSKLTVDKSR
WQQGNVFSCSVMHEALHNHYTQKSLSLSPGKIYIWAPLAGTCGVLLLSLVITLYC
VL4
MALPVTALLLPLALLLHAARPEVKLVESGGGLVQPGRSLRLSCTASGFTFTDYYMSWVRQAPGKGLE
WVGLIRSKADGYTTEYSASVKGRFTISRDDSKSILYLQMNSLKTEDTAVYYCARDAAYYSYYSPEGAMD
YWGQGTLVTVSSGGGGSGGGGSGGGGSMADYKDIQMTQSPSSVSASVGDRVTITCRASQNVDSAV
AWYQQKPGKAPKLLIYSASYRYSGVPSRFSGSGSGTDFTLTISSLQPEDFATYYCQQYYSTPWTFGQGT
KVEIKREPKSPDKTHTCPPCPAPPVAGPSVFLFPPKPKDTLMIARTPEVTCVVVDVSHEDPEVKFNWYV
DGVEVHNAKTKPREEQYNSTYRVVSVLTVLHQDWLNGKEYKCKVSNKALPAPIEKTISKAKGQPREPQ
VYTLPPSRDELTKNQVSLTCLVKGFYPSDIAVEWESNGQPENNYKTTPPVLDSDGSFFLYSKLTVDKSR
WQQGNVFSCSVMHEALHNHYTQKSLSLSPGKIYIWAPLAGTCGVLLLSLVITLYC
VL5
MALPVTALLLPLALLLHAARPEVKLVESGGGLVQPGRSLRLSCTASGFTFTDYYMSWVRQAPGKGLE
WVGLIRSKADGYTTEYSASVKGRFTISRDDSKSILYLQMNSLKTEDTAVYYCARDAAYYSYYSPEGAMD
YWGQGTLVTVSSGGGGSGGGGSGGGGSMADYKDIQMTQSPSSVSASVGDRVTITCRASQNVDSAV
AWYQQKPGKAPKLLIYSASYRQSGVPSRFSGSGSGTDFTLTISSLQPEDFATYYCQQYYSTPWTFGQGT
KVEIKREPKSPDKTHTCPPCPAPPVAGPSVFLFPPKPKDTLMIARTPEVTCVVVDVSHEDPEVKFNWYV
DGVEVHNAKTKPREEQYNSTYRVVSVLTVLHQDWLNGKEYKCKVSNKALPAPIEKTISKAKGQPREPQ
VYTLPPSRDELTKNQVSLTCLVKGFYPSDIAVEWESNGQPENNYKTTPPVLDSDGSFFLYSKLTVDKSR
WQQGNVFSCSVMHEALHNHYTQKSLSLSPGKIYIWAPLAGTCGVLLLSLVITLYC
VL6
MALPVTALLLPLALLLHAARPEVKLVESGGGLVQPGRSLRLSCTASGFTFTDYYMSWVRQAPGKGLE
WVGLIRSKADGYTTEYSASVKGRFTISRDDSKSILYLQMNSLKTEDTAVYYCARDAAYYSYYSPEGAMD
YWGQGTLVTVSSGGGGSGGGGSGGGGSMADYKDIQMTQSPSSVSASVGDRVTITCRASQNVDSAV
AWYQQKPGKAPKLLIYSASYGQSGVPSRFSGSGSGTDFTLTISSLQPEDFATYYCQQYYSTPWTFGQG
TKVEIKREPKSPDKTHTCPPCPAPPVAGPSVFLFPPKPKDTLMIARTPEVTCVVVDVSHEDPEVKFNWY
VDGVEVHNAKTKPREEQYNSTYRVVSVLTVLHQDWLNGKEYKCKVSNKALPAPIEKTISKAKGQPREP
QVYTLPPSRDELTKNQVSLTCLVKGFYPSDIAVEWESNGQPENNYKTTPPVLDSDGSFFLYSKLTVDKS
RWQQGNVFSCSVMHEALHNHYTQKSLSLSPGKIYIWAPLAGTCGVLLLSLVITLYC
Version 5 VH2
VL1
MALPVTALLLPLALLLHAARPEVQLVESGGGLVQPGRSLRLSCTASGFTFTDYYMSWVRQAPGKGLE
WVGLIRSKADGYTTEYSASVKGRFTISRDDSKSILYLQMNSLKTEDTAVYYCARDAAYYSYYSPEGAMD
YWGQGTLVTVSSGGGGSGGGGSGGGGSMADYKDIVMTQSPSSVSASVGDRVTITCRASQNVDSAV
AWYQQKPGKAPKALIYSASYRYSGVPSRFSGRGSGTDFTLTISSLQPEDFATYYCQQYYSTPWTFGQGT
KVEIKREPKSPDKTHTCPPCPAPPVAGPSVFLFPPKPKDTLMIARTPEVTCVVVDVSHEDPEVKFNWYV
DGVEVHNAKTKPREEQYNSTYRVVSVLTVLHQDWLNGKEYKCKVSNKALPAPIEKTISKAKGQPREPQ
VYTLPPSRDELTKNQVSLTCLVKGFYPSDIAVEWESNGQPENNYKTTPPVLDSDGSFFLYSKLTVDKSR
WQQGNVFSCSVMHEALHNHYTQKSLSLSPGKIYIWAPLAGTCGVLLLSLVITLYC
VL2
MALPVTALLLPLALLLHAARPEVQLVESGGGLVQPGRSLRLSCTASGFTFTDYYMSWVRQAPGKGLE
WVGLIRSKADGYTTEYSASVKGRFTISRDDSKSILYLQMNSLKTEDTAVYYCARDAAYYSYYSPEGAMD
YWGQGTLVTVSSGGGGSGGGGSGGGGSMADYKDIQMTQSPSSVSASVGDRVTITCRASQNVDSAV
AWYQQKPGKAPKALIYSASYRYSGVPSRFSGRGSGTDFTLTISSLQPEDFATYYCQQYYSTPWTFGQGT
KVEIKREPKSPDKTHTCPPCPAPPVAGPSVFLFPPKPKDTLMIARTPEVTCVVVDVSHEDPEVKFNWYV
DGVEVHNAKTKPREEQYNSTYRVVSVLTVLHQDWLNGKEYKCKVSNKALPAPIEKTISKAKGQPREPQ
VYTLPPSRDELTKNQVSLTCLVKGFYPSDIAVEWESNGQPENNYKTTPPVLDSDGSFFLYSKLTVDKSR
WQQGNVFSCSVMHEALHNHYTQKSLSLSPGKIYIWAPLAGTCGVLLLSLVITLYC
VL3
MALPVTALLLPLALLLHAARPEVQLVESGGGLVQPGRSLRLSCTASGFTFTDYYMSWVRQAPGKGLE
WVGLIRSKADGYTTEYSASVKGRFTISRDDSKSILYLQMNSLKTEDTAVYYCARDAAYYSYYSPEGAMD
YWGQGTLVTVSSGGGGSGGGGSGGGGSMADYKDIQMTQSPSSVSASVGDRVTITCRASQNVDSAV
AWYQQKPGKAPKALIYSASYRYSGVPSRFSGSGSGTDFTLTISSLQPEDFATYYCQQYYSTPWTFGQGT
KVEIKREPKSPDKTHTCPPCPAPPVAGPSVFLFPPKPKDTLMIARTPEVTCVVVDVSHEDPEVKFNWYV
DGVEVHNAKTKPREEQYNSTYRVVSVLTVLHQDWLNGKEYKCKVSNKALPAPIEKTISKAKGQPREPQ
VYTLPPSRDELTKNQVSLTCLVKGFYPSDIAVEWESNGQPENNYKTTPPVLDSDGSFFLYSKLTVDKSR
WQQGNVFSCSVMHEALHNHYTQKSLSLSPGKIYIWAPLAGTCGVLLLSLVITLYC
VL4
MALPVTALLLPLALLLHAARPEVQLVESGGGLVQPGRSLRLSCTASGFTFTDYYMSWVRQAPGKGLE
WVGLIRSKADGYTTEYSASVKGRFTISRDDSKSILYLQMNSLKTEDTAVYYCARDAAYYSYYSPEGAMD
YWGQGTLVTVSSGGGGSGGGGSGGGGSMADYKDIQMTQSPSSVSASVGDRVTITCRASQNVDSAV
AWYQQKPGKAPKLLIYSASYRYSGVPSRFSGSGSGTDFTLTISSLQPEDFATYYCQQYYSTPWTFGQGT
KVEIKREPKSPDKTHTCPPCPAPPVAGPSVFLFPPKPKDTLMIARTPEVTCVVVDVSHEDPEVKFNWYV
DGVEVHNAKTKPREEQYNSTYRVVSVLTVLHQDWLNGKEYKCKVSNKALPAPIEKTISKAKGQPREPQ
VYTLPPSRDELTKNQVSLTCLVKGFYPSDIAVEWESNGQPENNYKTTPPVLDSDGSFFLYSKLTVDKSR
WQQGNVFSCSVMHEALHNHYTQKSLSLSPGKIYIWAPLAGTCGVLLLSLVITLYC
VL5
MALPVTALLLPLALLLHAARPEVQLVESGGGLVQPGRSLRLSCTASGFTFTDYYMSWVRQAPGKGLE
WVGLIRSKADGYTTEYSASVKGRFTISRDDSKSILYLQMNSLKTEDTAVYYCARDAAYYSYYSPEGAMD
YWGQGTLVTVSSGGGGSGGGGSGGGGSMADYKDIQMTQSPSSVSASVGDRVTITCRASQNVDSAV
AWYQQKPGKAPKLLIYSASYRQSGVPSRFSGSGSGTDFTLTISSLQPEDFATYYCQQYYSTPWTFGQGT
KVEIKREPKSPDKTHTCPPCPAPPVAGPSVFLFPPKPKDTLMIARTPEVTCVVVDVSHEDPEVKFNWYV
DGVEVHNAKTKPREEQYNSTYRVVSVLTVLHQDWLNGKEYKCKVSNKALPAPIEKTISKAKGQPREPQ
VYTLPPSRDELTKNQVSLTCLVKGFYPSDIAVEWESNGQPENNYKTTPPVLDSDGSFFLYSKLTVDKSR
WQQGNVFSCSVMHEALHNHYTQKSLSLSPGKIYIWAPLAGTCGVLLLSLVITLYC
VL6
MALPVTALLLPLALLLHAARPEVQLVESGGGLVQPGRSLRLSCTASGFTFTDYYMSWVRQAPGKGLE
WVGLIRSKADGYTTEYSASVKGRFTISRDDSKSILYLQMNSLKTEDTAVYYCARDAAYYSYYSPEGAMD
YWGQGTLVTVSSGGGGSGGGGSGGGGSMADYKDIQMTQSPSSVSASVGDRVTITCRASQNVDSAV
AWYQQKPGKAPKLLIYSASYGQSGVPSRFSGSGSGTDFTLTISSLQPEDFATYYCQQYYSTPWTFGQG
TKVEIKREPKSPDKTHTCPPCPAPPVAGPSVFLFPPKPKDTLMIARTPEVTCVVVDVSHEDPEVKFNWY
VDGVEVHNAKTKPREEQYNSTYRVVSVLTVLHQDWLNGKEYKCKVSNKALPAPIEKTISKAKGQPREP
QVYTLPPSRDELTKNQVSLTCLVKGFYPSDIAVEWESNGQPENNYKTTPPVLDSDGSFFLYSKLTVDKS
RWQQGNVFSCSVMHEALHNHYTQKSLSLSPGKIYIWAPLAGTCGVLLLSLVITLYC
Version 5 VH3
VL1
MALPVTALLLPLALLLHAARPEVQLVESGGGLVQPGRSLRLSCTASGFTFTDYYMSWVRQAPGKGLE
WVGLIRSKADGYTTEYSASVKGRFTISRDDSKSIAYLQMNSLKTEDTAVYYCARDAAYYSYYSPEGAMD
YWGQGTLVTVSSGGGGSGGGGSGGGGSMADYKDIVMTQSPSSVSASVGDRVTITCRASQNVDSAV
AWYQQKPGKAPKALIYSASYRYSGVPSRFSGRGSGTDFTLTISSLQPEDFATYYCQQYYSTPWTFGQGT
KVEIKREPKSPDKTHTCPPCPAPPVAGPSVFLFPPKPKDTLMIARTPEVTCVVVDVSHEDPEVKFNWYV
DGVEVHNAKTKPREEQYNSTYRVVSVLTVLHQDWLNGKEYKCKVSNKALPAPIEKTISKAKGQPREPQ
VYTLPPSRDELTKNQVSLTCLVKGFYPSDIAVEWESNGQPENNYKTTPPVLDSDGSFFLYSKLTVDKSR
WQQGNVFSCSVMHEALHNHYTQKSLSLSPGKIYIWAPLAGTCGVLLLSLVITLYC
VL2
MALPVTALLLPLALLLHAARPEVQLVESGGGLVQPGRSLRLSCTASGFTFTDYYMSWVRQAPGKGLE
WVGLIRSKADGYTTEYSASVKGRFTISRDDSKSIAYLQMNSLKTEDTAVYYCARDAAYYSYYSPEGAMD
YWGQGTLVTVSSGGGGSGGGGSGGGGSMADYKDIQMTQSPSSVSASVGDRVTITCRASQNVDSAV
AWYQQKPGKAPKALIYSASYRYSGVPSRFSGRGSGTDFTLTISSLQPEDFATYYCQQYYSTPWTFGQGT
KVEIKREPKSPDKTHTCPPCPAPPVAGPSVFLFPPKPKDTLMIARTPEVTCVVVDVSHEDPEVKFNWYV
DGVEVHNAKTKPREEQYNSTYRVVSVLTVLHQDWLNGKEYKCKVSNKALPAPIEKTISKAKGQPREPQ
VYTLPPSRDELTKNQVSLTCLVKGFYPSDIAVEWESNGQPENNYKTTPPVLDSDGSFFLYSKLTVDKSR
WQQGNVFSCSVMHEALHNHYTQKSLSLSPGKIYIWAPLAGTCGVLLLSLVITLYC
VL3
MALPVTALLLPLALLLHAARPEVQLVESGGGLVQPGRSLRLSCTASGFTFTDYYMSWVRQAPGKGLE
WVGLIRSKADGYTTEYSASVKGRFTISRDDSKSIAYLQMNSLKTEDTAVYYCARDAAYYSYYSPEGAMD
YWGQGTLVTVSSGGGGSGGGGSGGGGSMADYKDIQMTQSPSSVSASVGDRVTITCRASQNVDSAV
AWYQQKPGKAPKALIYSASYRYSGVPSRFSGSGSGTDFTLTISSLQPEDFATYYCQQYYSTPWTFGQGT
KVEIKREPKSPDKTHTCPPCPAPPVAGPSVFLFPPKPKDTLMIARTPEVTCVVVDVSHEDPEVKFNWYV
DGVEVHNAKTKPREEQYNSTYRVVSVLTVLHQDWLNGKEYKCKVSNKALPAPIEKTISKAKGQPREPQ
VYTLPPSRDELTKNQVSLTCLVKGFYPSDIAVEWESNGQPENNYKTTPPVLDSDGSFFLYSKLTVDKSR
WQQGNVFSCSVMHEALHNHYTQKSLSLSPGKIYIWAPLAGTCGVLLLSLVITLYC
VL4
MALPVTALLLPLALLLHAARPEVQLVESGGGLVQPGRSLRLSCTASGFTFTDYYMSWVRQAPGKGLE
WVGLIRSKADGYTTEYSASVKGRFTISRDDSKSIAYLQMNSLKTEDTAVYYCARDAAYYSYYSPEGAMD
YWGQGTLVTVSSGGGGSGGGGSGGGGSMADYKDIQMTQSPSSVSASVGDRVTITCRASQNVDSAV
AWYQQKPGKAPKLLIYSASYRYSGVPSRFSGSGSGTDFTLTISSLQPEDFATYYCQQYYSTPWTFGQGT
KVEIKREPKSPDKTHTCPPCPAPPVAGPSVFLFPPKPKDTLMIARTPEVTCVVVDVSHEDPEVKFNWYV
DGVEVHNAKTKPREEQYNSTYRVVSVLTVLHQDWLNGKEYKCKVSNKALPAPIEKTISKAKGQPREPQ
VYTLPPSRDELTKNQVSLTCLVKGFYPSDIAVEWESNGQPENNYKTTPPVLDSDGSFFLYSKLTVDKSR
WQQGNVFSCSVMHEALHNHYTQKSLSLSPGKIYIWAPLAGTCGVLLLSLVITLYC
VL5
MALPVTALLLPLALLLHAARPEVQLVESGGGLVQPGRSLRLSCTASGFTFTDYYMSWVRQAPGKGLE
WVGLIRSKADGYTTEYSASVKGRFTISRDDSKSIAYLQMNSLKTEDTAVYYCARDAAYYSYYSPEGAMD
YWGQGTLVTVSSGGGGSGGGGSGGGGSMADYKDIQMTQSPSSVSASVGDRVTITCRASQNVDSAV
AWYQQKPGKAPKLLIYSASYRQSGVPSRFSGSGSGTDFTLTISSLQPEDFATYYCQQYYSTPWTFGQGT
KVEIKREPKSPDKTHTCPPCPAPPVAGPSVFLFPPKPKDTLMIARTPEVTCVVVDVSHEDPEVKFNWYV
DGVEVHNAKTKPREEQYNSTYRVVSVLTVLHQDWLNGKEYKCKVSNKALPAPIEKTISKAKGQPREPQ
VYTLPPSRDELTKNQVSLTCLVKGFYPSDIAVEWESNGQPENNYKTTPPVLDSDGSFFLYSKLTVDKSR
WQQGNVFSCSVMHEALHNHYTQKSLSLSPGKIYIWAPLAGTCGVLLLSLVITLYC
VL6
MALPVTALLLPLALLLHAARPEVQLVESGGGLVQPGRSLRLSCTASGFTFTDYYMSWVRQAPGKGLE
WVGLIRSKADGYTTEYSASVKGRFTISRDDSKSIAYLQMNSLKTEDTAVYYCARDAAYYSYYSPEGAMD
YWGQGTLVTVSSGGGGSGGGGSGGGGSMADYKDIQMTQSPSSVSASVGDRVTITCRASQNVDSAV
AWYQQKPGKAPKLLIYSASYGQSGVPSRFSGSGSGTDFTLTISSLQPEDFATYYCQQYYSTPWTFGQG
TKVEIKREPKSPDKTHTCPPCPAPPVAGPSVFLFPPKPKDTLMIARTPEVTCVVVDVSHEDPEVKFNWY
VDGVEVHNAKTKPREEQYNSTYRVVSVLTVLHQDWLNGKEYKCKVSNKALPAPIEKTISKAKGQPREP
QVYTLPPSRDELTKNQVSLTCLVKGFYPSDIAVEWESNGQPENNYKTTPPVLDSDGSFFLYSKLTVDKS
RWQQGNVFSCSVMHEALHNHYTQKSLSLSPGKIYIWAPLAGTCGVLLLSLVITLYC
Version 5 VH4
VL1
MALPVTALLLPLALLLHAARPEVQLVESGGGLVQPGRSLRLSCTASGFTFTDYYMSWVRQAPGKGLE
WVGFIRSKADGYTTEYSASVKGRFTISRDDSKSIAYLQMNSLKTEDTAVYYCARDAAYYSYYSPEGAMD
YWGQGTLVTVSSGGGGSGGGGSGGGGSMADYKDIVMTQSPSSVSASVGDRVTITCRASQNVDSAV
AWYQQKPGKAPKALIYSASYRYSGVPSRFSGRGSGTDFTLTISSLQPEDFATYYCQQYYSTPWTFGQGT
KVEIKREPKSPDKTHTCPPCPAPPVAGPSVFLFPPKPKDTLMIARTPEVTCVVVDVSHEDPEVKFNWYV
DGVEVHNAKTKPREEQYNSTYRVVSVLTVLHQDWLNGKEYKCKVSNKALPAPIEKTISKAKGQPREPQ
VYTLPPSRDELTKNQVSLTCLVKGFYPSDIAVEWESNGQPENNYKTTPPVLDSDGSFFLYSKLTVDKSR
WQQGNVFSCSVMHEALHNHYTQKSLSLSPGKIYIWAPLAGTCGVLLLSLVITLYC
VL2
MALPVTALLLPLALLLHAARPEVQLVESGGGLVQPGRSLRLSCTASGFTFTDYYMSWVRQAPGKGLE
WVGFIRSKADGYTTEYSASVKGRFTISRDDSKSIAYLQMNSLKTEDTAVYYCARDAAYYSYYSPEGAMD
YWGQGTLVTVSSGGGGSGGGGSGGGGSMADYKDIQMTQSPSSVSASVGDRVTITCRASQNVDSAV
AWYQQKPGKAPKALIYSASYRYSGVPSRFSGRGSGTDFTLTISSLQPEDFATYYCQQYYSTPWTFGQGT
KVEIKREPKSPDKTHTCPPCPAPPVAGPSVFLFPPKPKDTLMIARTPEVTCVVVDVSHEDPEVKFNWYV
DGVEVHNAKTKPREEQYNSTYRVVSVLTVLHQDWLNGKEYKCKVSNKALPAPIEKTISKAKGQPREPQ
VYTLPPSRDELTKNQVSLTCLVKGFYPSDIAVEWESNGQPENNYKTTPPVLDSDGSFFLYSKLTVDKSR
WQQGNVFSCSVMHEALHNHYTQKSLSLSPGKIYIWAPLAGTCGVLLLSLVITLYC
VL3
MALPVTALLLPLALLLHAARPEVQLVESGGGLVQPGRSLRLSCTASGFTFTDYYMSWVRQAPGKGLE
WVGFIRSKADGYTTEYSASVKGRFTISRDDSKSIAYLQMNSLKTEDTAVYYCARDAAYYSYYSPEGAMD
YWGQGTLVTVSSGGGGSGGGGSGGGGSMADYKDIQMTQSPSSVSASVGDRVTITCRASQNVDSAV
AWYQQKPGKAPKALIYSASYRYSGVPSRFSGSGSGTDFTLTISSLQPEDFATYYCQQYYSTPWTFGQGT
KVEIKREPKSPDKTHTCPPCPAPPVAGPSVFLFPPKPKDTLMIARTPEVTCVVVDVSHEDPEVKFNWYV
DGVEVHNAKTKPREEQYNSTYRVVSVLTVLHQDWLNGKEYKCKVSNKALPAPIEKTISKAKGQPREPQ
VYTLPPSRDELTKNQVSLTCLVKGFYPSDIAVEWESNGQPENNYKTTPPVLDSDGSFFLYSKLTVDKSR
WQQGNVFSCSVMHEALHNHYTQKSLSLSPGKIYIWAPLAGTCGVLLLSLVITLYC
VL4
MALPVTALLLPLALLLHAARPEVQLVESGGGLVQPGRSLRLSCTASGFTFTDYYMSWVRQAPGKGLE
WVGFIRSKADGYTTEYSASVKGRFTISRDDSKSIAYLQMNSLKTEDTAVYYCARDAAYYSYYSPEGAMD
YWGQGTLVTVSSGGGGSGGGGSGGGGSMADYKDIQMTQSPSSVSASVGDRVTITCRASQNVDSAV
AWYQQKPGKAPKLLIYSASYRYSGVPSRFSGSGSGTDFTLTISSLQPEDFATYYCQQYYSTPWTFGQGT
KVEIKREPKSPDKTHTCPPCPAPPVAGPSVFLFPPKPKDTLMIARTPEVTCVVVDVSHEDPEVKFNWYV
DGVEVHNAKTKPREEQYNSTYRVVSVLTVLHQDWLNGKEYKCKVSNKALPAPIEKTISKAKGQPREPQ
VYTLPPSRDELTKNQVSLTCLVKGFYPSDIAVEWESNGQPENNYKTTPPVLDSDGSFFLYSKLTVDKSR
WQQGNVFSCSVMHEALHNHYTQKSLSLSPGKIYIWAPLAGTCGVLLLSLVITLYC
VL5
MALPVTALLLPLALLLHAARPEVQLVESGGGLVQPGRSLRLSCTASGFTFTDYYMSWVRQAPGKGLE
WVGFIRSKADGYTTEYSASVKGRFTISRDDSKSIAYLQMNSLKTEDTAVYYCARDAAYYSYYSPEGAMD
YWGQGTLVTVSSGGGGSGGGGSGGGGSMADYKDIQMTQSPSSVSASVGDRVTITCRASQNVDSAV
AWYQQKPGKAPKLLIYSASYRQSGVPSRFSGSGSGTDFTLTISSLQPEDFATYYCQQYYSTPWTFGQGT
KVEIKREPKSPDKTHTCPPCPAPPVAGPSVFLFPPKPKDTLMIARTPEVTCVVVDVSHEDPEVKFNWYV
DGVEVHNAKTKPREEQYNSTYRVVSVLTVLHQDWLNGKEYKCKVSNKALPAPIEKTISKAKGQPREPQ
VYTLPPSRDELTKNQVSLTCLVKGFYPSDIAVEWESNGQPENNYKTTPPVLDSDGSFFLYSKLTVDKSR
WQQGNVFSCSVMHEALHNHYTQKSLSLSPGKIYIWAPLAGTCGVLLLSLVITLYC
VL6
MALPVTALLLPLALLLHAARPEVQLVESGGGLVQPGRSLRLSCTASGFTFTDYYMSWVRQAPGKGLE
WVGFIRSKADGYTTEYSASVKGRFTISRDDSKSIAYLQMNSLKTEDTAVYYCARDAAYYSYYSPEGAMD
YWGQGTLVTVSSGGGGSGGGGSGGGGSMADYKDIQMTQSPSSVSASVGDRVTITCRASQNVDSAV
AWYQQKPGKAPKLLIYSASYGQSGVPSRFSGSGSGTDFTLTISSLQPEDFATYYCQQYYSTPWTFGQG
TKVEIKREPKSPDKTHTCPPCPAPPVAGPSVFLFPPKPKDTLMIARTPEVTCVVVDVSHEDPEVKFNWY
VDGVEVHNAKTKPREEQYNSTYRVVSVLTVLHQDWLNGKEYKCKVSNKALPAPIEKTISKAKGQPREP
QVYTLPPSRDELTKNQVSLTCLVKGFYPSDIAVEWESNGQPENNYKTTPPVLDSDGSFFLYSKLTVDKS
RWQQGNVFSCSVMHEALHNHYTQKSLSLSPGKIYIWAPLAGTCGVLLLSLVITLYC
VH5
Version 5 VH5
VL1
MALPVTALLLPLALLLHAARPEVQLVESGGGLVQPGRSLRLSCTASGFTFTDYYMSWVRQAPGKGLE
WVGFIRSKADGYTTEYAASVKGRFTISRDDSKSIAYLQMNSLKTEDTAVYYCARDAAYYSYYSPEGAM
DYWGQGTLVTVSSGGGGSGGGGSGGGGSMADYKDIVMTQSPSSVSASVGDRVTITCRASQNVDSA
VAWYQQKPGKAPKALIYSASYRYSGVPSRFSGRGSGTDFTLTISSLQPEDFATYYCQQYYSTPWTFGQ
GTKVEIKREPKSPDKTHTCPPCPAPPVAGPSVFLFPPKPKDTLMIARTPEVTCVVVDVSHEDPEVKFNW
YVDGVEVHNAKTKPREEQYNSTYRVVSVLTVLHQDWLNGKEYKCKVSNKALPAPIEKTISKAKGQPRE
PQVYTLPPSRDELTKNQVSLTCLVKGFYPSDIAVEWESNGQPENNYKTTPPVLDSDGSFFLYSKLTVDK
SRWQQGNVFSCSVMHEALHNHYTQKSLSLSPGKIYIWAPLAGTCGVLLLSLVITLYC
VL2
MALPVTALLLPLALLLHAARPEVQLVESGGGLVQPGRSLRLSCTASGFTFTDYYMSWVRQAPGKGLE
WVGFIRSKADGYTTEYAASVKGRFTISRDDSKSIAYLQMNSLKTEDTAVYYCARDAAYYSYYSPEGAM
DYWGQGTLVTVSSGGGGSGGGGSGGGGSMADYKDIQMTQSPSSVSASVGDRVTITCRASQNVDSA
VAWYQQKPGKAPKALIYSASYRYSGVPSRFSGRGSGTDFTLTISSLQPEDFATYYCQQYYSTPWTFGQ
GTKVEIKREPKSPDKTHTCPPCPAPPVAGPSVFLFPPKPKDTLMIARTPEVTCVVVDVSHEDPEVKFNW
YVDGVEVHNAKTKPREEQYNSTYRVVSVLTVLHQDWLNGKEYKCKVSNKALPAPIEKTISKAKGQPRE
PQVYTLPPSRDELTKNQVSLTCLVKGFYPSDIAVEWESNGQPENNYKTTPPVLDSDGSFFLYSKLTVDK
SRWQQGNVFSCSVMHEALHNHYTQKSLSLSPGKIYIWAPLAGTCGVLLLSLVITLYC
VL3
MALPVTALLLPLALLLHAARPEVQLVESGGGLVQPGRSLRLSCTASGFTFTDYYMSWVRQAPGKGLE
WVGFIRSKADGYTTEYAASVKGRFTISRDDSKSIAYLQMNSLKTEDTAVYYCARDAAYYSYYSPEGAM
DYWGQGTLVTVSSGGGGSGGGGSGGGGSMADYKDIQMTQSPSSVSASVGDRVTITCRASQNVDSA
VAWYQQKPGKAPKALIYSASYRYSGVPSRFSGSGSGTDFTLTISSLQPEDFATYYCQQYYSTPWTFGQG
TKVEIKREPKSPDKTHTCPPCPAPPVAGPSVFLFPPKPKDTLMIARTPEVTCVVVDVSHEDPEVKFNWY
VDGVEVHNAKTKPREEQYNSTYRVVSVLTVLHQDWLNGKEYKCKVSNKALPAPIEKTISKAKGQPREP
QVYTLPPSRDELTKNQVSLTCLVKGFYPSDIAVEWESNGQPENNYKTTPPVLDSDGSFFLYSKLTVDKS
RWQQGNVFSCSVMHEALHNHYTQKSLSLSPGKIYIWAPLAGTCGVLLLSLVITLYC
VL4
MALPVTALLLPLALLLHAARPEVQLVESGGGLVQPGRSLRLSCTASGFTFTDYYMSWVRQAPGKGLE
WVGFIRSKADGYTTEYAASVKGRFTISRDDSKSIAYLQMNSLKTEDTAVYYCARDAAYYSYYSPEGAM
DYWGQGTLVTVSSGGGGSGGGGSGGGGSMADYKDIQMTQSPSSVSASVGDRVTITCRASQNVDSA
VAWYQQKPGKAPKLLIYSASYRYSGVPSRFSGSGSGTDFTLTISSLQPEDFATYYCQQYYSTPWTFGQG
TKVEIKREPKSPDKTHTCPPCPAPPVAGPSVFLFPPKPKDTLMIARTPEVTCVVVDVSHEDPEVKFNWY
VDGVEVHNAKTKPREEQYNSTYRVVSVLTVLHQDWLNGKEYKCKVSNKALPAPIEKTISKAKGQPREP
QVYTLPPSRDELTKNQVSLTCLVKGFYPSDIAVEWESNGQPENNYKTTPPVLDSDGSFFLYSKLTVDKS
RWQQGNVFSCSVMHEALHNHYTQKSLSLSPGKIYIWAPLAGTCGVLLLSLVITLYC
VL5
MALPVTALLLPLALLLHAARPEVQLVESGGGLVQPGRSLRLSCTASGFTFTDYYMSWVRQAPGKGLE
WVGFIRSKADGYTTEYAASVKGRFTISRDDSKSIAYLQMNSLKTEDTAVYYCARDAAYYSYYSPEGAM
DYWGQGTLVTVSSGGGGSGGGGSGGGGSMADYKDIQMTQSPSSVSASVGDRVTITCRASQNVDSA
VAWYQQKPGKAPKLLIYSASYRQSGVPSRFSGSGSGTDFTLTISSLQPEDFATYYCQQYYSTPWTFGQ
GTKVEIKREPKSPDKTHTCPPCPAPPVAGPSVFLFPPKPKDTLMIARTPEVTCVVVDVSHEDPEVKFNW
YVDGVEVHNAKTKPREEQYNSTYRVVSVLTVLHQDWLNGKEYKCKVSNKALPAPIEKTISKAKGQPRE
PQVYTLPPSRDELTKNQVSLTCLVKGFYPSDIAVEWESNGQPENNYKTTPPVLDSDGSFFLYSKLTVDK
SRWQQGNVFSCSVMHEALHNHYTQKSLSLSPGKIYIWAPLAGTCGVLLLSLVITLYC
VL6
MALPVTALLLPLALLLHAARPEVQLVESGGGLVQPGRSLRLSCTASGFTFTDYYMSWVRQAPGKGLE
WVGFIRSKADGYTTEYAASVKGRFTISRDDSKSIAYLQMNSLKTEDTAVYYCARDAAYYSYYSPEGAM
DYWGQGTLVTVSSGGGGSGGGGSGGGGSMADYKDIQMTQSPSSVSASVGDRVTITCRASQNVDSA
VAWYQQKPGKAPKLLIYSASYGQSGVPSRFSGSGSGTDFTLTISSLQPEDFATYYCQQYYSTPWTFGQ
GTKVEIKREPKSPDKTHTCPPCPAPPVAGPSVFLFPPKPKDTLMIARTPEVTCVVVDVSHEDPEVKFNW
YVDGVEVHNAKTKPREEQYNSTYRVVSVLTVLHQDWLNGKEYKCKVSNKALPAPIEKTISKAKGQPRE
PQVYTLPPSRDELTKNQVSLTCLVKGFYPSDIAVEWESNGQPENNYKTTPPVLDSDGSFFLYSKLTVDK
SRWQQGNVFSCSVMHEALHNHYTQKSLSLSPGKIYIWAPLAGTCGVLLLSLVITLYC
Version 5 VH6
VL1
MALPVTALLLPLALLLHAARPEVQLVESGGGLVQPGRSLRLSCTASGFTFTDYYMSWVRQAPGKGLE
WVGLIRSKADGYTTEYAASVKGRFTISRDDSKSIAYLQMNSLKTEDTAVYYCARDAAYYSYYSPEGAM
DYWGQGTLVTVSSGGGGSGGGGSGGGGSMADYKDIVMTQSPSSVSASVGDRVTITCRASQNVDSA
VAWYQQKPGKAPKALIYSASYRYSGVPSRFSGRGSGTDFTLTISSLQPEDFATYYCQQYYSTPWTFGQ
GTKVEIKREPKSPDKTHTCPPCPAPPVAGPSVFLFPPKPKDTLMIARTPEVTCVVVDVSHEDPEVKFNW
YVDGVEVHNAKTKPREEQYNSTYRVVSVLTVLHQDWLNGKEYKCKVSNKALPAPIEKTISKAKGQPRE
PQVYTLPPSRDELTKNQVSLTCLVKGFYPSDIAVEWESNGQPENNYKTTPPVLDSDGSFFLYSKLTVDK
SRWQQGNVFSCSVMHEALHNHYTQKSLSLSPGKIYIWAPLAGTCGVLLLSLVITLYC
VL2
MALPVTALLLPLALLLHAARPEVQLVESGGGLVQPGRSLRLSCTASGFTFTDYYMSWVRQAPGKGLE
WVGLIRSKADGYTTEYAASVKGRFTISRDDSKSIAYLQMNSLKTEDTAVYYCARDAAYYSYYSPEGAM
DYWGQGTLVTVSSGGGGSGGGGSGGGGSMADYKDIQMTQSPSSVSASVGDRVTITCRASQNVDSA
VAWYQQKPGKAPKALIYSASYRYSGVPSRFSGRGSGTDFTLTISSLQPEDFATYYCQQYYSTPWTFGQ
GTKVEIKREPKSPDKTHTCPPCPAPPVAGPSVFLFPPKPKDTLMIARTPEVTCVVVDVSHEDPEVKFNW
YVDGVEVHNAKTKPREEQYNSTYRVVSVLTVLHQDWLNGKEYKCKVSNKALPAPIEKTISKAKGQPRE
PQVYTLPPSRDELTKNQVSLTCLVKGFYPSDIAVEWESNGQPENNYKTTPPVLDSDGSFFLYSKLTVDK
SRWQQGNVFSCSVMHEALHNHYTQKSLSLSPGKIYIWAPLAGTCGVLLLSLVITLYC
VL3
MALPVTALLLPLALLLHAARPEVQLVESGGGLVQPGRSLRLSCTASGFTFTDYYMSWVRQAPGKGLE
WVGLIRSKADGYTTEYAASVKGRFTISRDDSKSIAYLQMNSLKTEDTAVYYCARDAAYYSYYSPEGAM
DYWGQGTLVTVSSGGGGSGGGGSGGGGSMADYKDIQMTQSPSSVSASVGDRVTITCRASQNVDSA
VAWYQQKPGKAPKALIYSASYRYSGVPSRFSGSGSGTDFTLTISSLQPEDFATYYCQQYYSTPWTFGQG
TKVEIKREPKSPDKTHTCPPCPAPPVAGPSVFLFPPKPKDTLMIARTPEVTCVVVDVSHEDPEVKFNWY
VDGVEVHNAKTKPREEQYNSTYRVVSVLTVLHQDWLNGKEYKCKVSNKALPAPIEKTISKAKGQPREP
QVYTLPPSRDELTKNQVSLTCLVKGFYPSDIAVEWESNGQPENNYKTTPPVLDSDGSFFLYSKLTVDKS
RWQQGNVFSCSVMHEALHNHYTQKSLSLSPGKIYIWAPLAGTCGVLLLSLVITLYC
VL4
MALPVTALLLPLALLLHAARPEVQLVESGGGLVQPGRSLRLSCTASGFTFTDYYMSWVRQAPGKGLE
WVGLIRSKADGYTTEYAASVKGRFTISRDDSKSIAYLQMNSLKTEDTAVYYCARDAAYYSYYSPEGAM
DYWGQGTLVTVSSGGGGSGGGGSGGGGSMADYKDIQMTQSPSSVSASVGDRVTITCRASQNVDSA
VAWYQQKPGKAPKLLIYSASYRYSGVPSRFSGSGSGTDFTLTISSLQPEDFATYYCQQYYSTPWTFGQG
TKVEIKREPKSPDKTHTCPPCPAPPVAGPSVFLFPPKPKDTLMIARTPEVTCVVVDVSHEDPEVKFNWY
VDGVEVHNAKTKPREEQYNSTYRVVSVLTVLHQDWLNGKEYKCKVSNKALPAPIEKTISKAKGQPREP
QVYTLPPSRDELTKNQVSLTCLVKGFYPSDIAVEWESNGQPENNYKTTPPVLDSDGSFFLYSKLTVDKS
RWQQGNVFSCSVMHEALHNHYTQKSLSLSPGKIYIWAPLAGTCGVLLLSLVITLYC
VL5
MALPVTALLLPLALLLHAARPEVQLVESGGGLVQPGRSLRLSCTASGFTFTDYYMSWVRQAPGKGLE
WVGLIRSKADGYTTEYAASVKGRFTISRDDSKSIAYLQMNSLKTEDTAVYYCARDAAYYSYYSPEGAM
DYWGQGTLVTVSSGGGGSGGGGSGGGGSMADYKDIQMTQSPSSVSASVGDRVTITCRASQNVDSA
VAWYQQKPGKAPKLLIYSASYRQSGVPSRFSGSGSGTDFTLTISSLQPEDFATYYCQQYYSTPWTFGQ
GTKVEIKREPKSPDKTHTCPPCPAPPVAGPSVFLFPPKPKDTLMIARTPEVTCVVVDVSHEDPEVKFNW
YVDGVEVHNAKTKPREEQYNSTYRVVSVLTVLHQDWLNGKEYKCKVSNKALPAPIEKTISKAKGQPRE
PQVYTLPPSRDELTKNQVSLTCLVKGFYPSDIAVEWESNGQPENNYKTTPPVLDSDGSFFLYSKLTVDK
SRWQQGNVFSCSVMHEALHNHYTQKSLSLSPGKIYIWAPLAGTCGVLLLSLVITLYC
VL6
MALPVTALLLPLALLLHAARPEVQLVESGGGLVQPGRSLRLSCTASGFTFTDYYMSWVRQAPGKGLE
WVGLIRSKADGYTTEYAASVKGRFTISRDDSKSIAYLQMNSLKTEDTAVYYCARDAAYYSYYSPEGAM
DYWGQGTLVTVSSGGGGSGGGGSGGGGSMADYKDIQMTQSPSSVSASVGDRVTITCRASQNVDSA
VAWYQQKPGKAPKLLIYSASYGQSGVPSRFSGSGSGTDFTLTISSLQPEDFATYYCQQYYSTPWTFGQ
GTKVEIKREPKSPDKTHTCPPCPAPPVAGPSVFLFPPKPKDTLMIARTPEVTCVVVDVSHEDPEVKFNW
YVDGVEVHNAKTKPREEQYNSTYRVVSVLTVLHQDWLNGKEYKCKVSNKALPAPIEKTISKAKGQPRE
PQVYTLPPSRDELTKNQVSLTCLVKGFYPSDIAVEWESNGQPENNYKTTPPVLDSDGSFFLYSKLTVDK
SRWQQGNVFSCSVMHEALHNHYTQKSLSLSPGKIYIWAPLAGTCGVLLLSLVITLYC
VH7
Version 5 VH7
VL1
MALPVTALLLPLALLLHAARPEVQLVESGGGLVQPGRSLRLSCTASGFTFTDYYMSWVRQAPGKGLE
WVGFIRSKADGYTTEYAASVKGRFTISRDDSKSIAYLQMNSLKTEDTAVYYCTRDAAYYSYYSPEGAMD
YWGQGTLVTVSSGGGGSGGGGSGGGGSMADYKDIVMTQSPSSVSASVGDRVTITCRASQNVDSAV
AWYQQKPGKAPKALIYSASYRYSGVPSRFSGRGSGTDFTLTISSLQPEDFATYYCQQYYSTPWTFGQGT
KVEIKREPKSPDKTHTCPPCPAPPVAGPSVFLFPPKPKDTLMIARTPEVTCVVVDVSHEDPEVKFNWYV
DGVEVHNAKTKPREEQYNSTYRVVSVLTVLHQDWLNGKEYKCKVSNKALPAPIEKTISKAKGQPREPQ
VYTLPPSRDELTKNQVSLTCLVKGFYPSDIAVEWESNGQPENNYKTTPPVLDSDGSFFLYSKLTVDKSR
WQQGNVFSCSVMHEALHNHYTQKSLSLSPGKIYIWAPLAGTCGVLLLSLVITLYC
VL2
MALPVTALLLPLALLLHAARPEVQLVESGGGLVQPGRSLRLSCTASGFTFTDYYMSWVRQAPGKGLE
WVGFIRSKADGYTTEYAASVKGRFTISRDDSKSIAYLQMNSLKTEDTAVYYCTRDAAYYSYYSPEGAMD
YWGQGTLVTVSSGGGGSGGGGSGGGGSMADYKDIQMTQSPSSVSASVGDRVTITCRASQNVDSAV
AWYQQKPGKAPKALIYSASYRYSGVPSRFSGRGSGTDFTLTISSLQPEDFATYYCQQYYSTPWTFGQGT
KVEIKREPKSPDKTHTCPPCPAPPVAGPSVFLFPPKPKDTLMIARTPEVTCVVVDVSHEDPEVKFNWYV
DGVEVHNAKTKPREEQYNSTYRVVSVLTVLHQDWLNGKEYKCKVSNKALPAPIEKTISKAKGQPREPQ
VYTLPPSRDELTKNQVSLTCLVKGFYPSDIAVEWESNGQPENNYKTTPPVLDSDGSFFLYSKLTVDKSR
WQQGNVFSCSVMHEALHNHYTQKSLSLSPGKIYIWAPLAGTCGVLLLSLVITLYC
VL3
MALPVTALLLPLALLLHAARPEVQLVESGGGLVQPGRSLRLSCTASGFTFTDYYMSWVRQAPGKGLEWVGF
IRSKADGYTTEYAASVKGRFTISRDDSKSIAYLQMNSLKTEDTAVYYCTRDAAYYSYYSPEGAMDYWGQGTL
VTVSSGGGGSGGGGSGGGGSMADYKDIQMTQSPSSVSASVGDRVTITCRASQNVDSAVAWYQQKPGKA
PKALIYSASYRYSGVPSRFSGSGSGTDFTLTISSLQPEDFATYYCQQYYSTPWTFGQGTKVEIKREPKSPDKTH
TCPPCPAPPVAGPSVFLFPPKPKDTLMIARTPEVTCVVVDVSHEDPEVKFNWYVDGVEVHNAKTKPREEQY
NSTYRVVSVLTVLHQDWLNGKEYKCKVSNKALPAPIEKTISKAKGQPREPQVYTLPPSRDELTKNQVSLTCLV
KGFYPSDIAVEWESNGQPENNYKTTPPVLDSDGSFFLYSKLTVDKSRWQQGNVFSCSVMHEALHNHYTQK
SLSLSPGKIYIWAPLAGTCGVLLLSLVITLYC
VL4
MALPVTALLLPLALLLHAARPEVQLVESGGGLVQPGRSLRLSCTASGFTFTDYYMSWVRQAPGKGLEWVGF
IRSKADGYTTEYAASVKGRFTISRDDSKSIAYLQMNSLKTEDTAVYYCTRDAAYYSYYSPEGAMDYWGQGTL
VTVSSGGGGSGGGGSGGGGSMADYKDIQMTQSPSSVSASVGDRVTITCRASQNVDSAVAWYQQKPGKA
PKLLIYSASYRYSGVPSRFSGSGSGTDFTLTISSLQPEDFATYYCQQYYSTPWTFGQGTKVEIKREPKSPDKTHT
CPPCPAPPVAGPSVFLFPPKPKDTLMIARTPEVTCVVVDVSHEDPEVKFNWYVDGVEVHNAKTKPREEQYN
STYRVVSVLTVLHQDWLNGKEYKCKVSNKALPAPIEKTISKAKGQPREPQVYTLPPSRDELTKNQVSLTCLVK
GFYPSDIAVEWESNGQPENNYKTTPPVLDSDGSFFLYSKLTVDKSRWQQGNVFSCSVMHEALHNHYTQKS
LSLSPGKIYIWAPLAGTCGVLLLSLVITLYC
VL5
MALPVTALLLPLALLLHAARPEVQLVESGGGLVQPGRSLRLSCTASGFTFTDYYMSWVRQAPGKGLE
WVGFIRSKADGYTTEYAASVKGRFTISRDDSKSIAYLQMNSLKTEDTAVYYCTRDAAYYSYYSPEGAMD
YWGQGTLVTVSSGGGGSGGGGSGGGGSMADYKDIQMTQSPSSVSASVGDRVTITCRASQNVDSAV
AWYQQKPGKAPKLLIYSASYRQSGVPSRFSGSGSGTDFTLTISSLQPEDFATYYCQQYYSTPWTFGQGT
KVEIKREPKSPDKTHTCPPCPAPPVAGPSVFLFPPKPKDTLMIARTPEVTCVVVDVSHEDPEVKFNWYV
DGVEVHNAKTKPREEQYNSTYRVVSVLTVLHQDWLNGKEYKCKVSNKALPAPIEKTISKAKGQPREPQ
VYTLPPSRDELTKNQVSLTCLVKGFYPSDIAVEWESNGQPENNYKTTPPVLDSDGSFFLYSKLTVDKSR
WQQGNVFSCSVMHEALHNHYTQKSLSLSPGKIYIWAPLAGTCGVLLLSLVITLYC
VL6
MALPVTALLLPLALLLHAARPEVQLVESGGGLVQPGRSLRLSCTASGFTFTDYYMSWVRQAPGKGLE
WVGFIRSKADGYTTEYAASVKGRFTISRDDSKSIAYLQMNSLKTEDTAVYYCTRDAAYYSYYSPEGAMD
YWGQGTLVTVSSGGGGSGGGGSGGGGSMADYKDIQMTQSPSSVSASVGDRVTITCRASQNVDSAV
AWYQQKPGKAPKLLIYSASYGQSGVPSRFSGSGSGTDFTLTISSLQPEDFATYYCQQYYSTPWTFGQG
TKVEIKREPKSPDKTHTCPPCPAPPVAGPSVFLFPPKPKDTLMIARTPEVTCVVVDVSHEDPEVKFNWY
VDGVEVHNAKTKPREEQYNSTYRVVSVLTVLHQDWLNGKEYKCKVSNKALPAPIEKTISKAKGQPREP
QVYTLPPSRDELTKNQVSLTCLVKGFYPSDIAVEWESNGQPENNYKTTPPVLDSDGSFFLYSKLTVDKS
RWQQGNVFSCSVMHEALHNHYTQKSLSLSPGKIYIWAPLAGTCGVLLLSLVITLYC

[0646] The following sequences are contemplated as preferred CAR of the invention

(SEQ ID NO 172)
EVQLVESGGGLVQPGRSLRLSCTASGFTFTDYYMSWVRQAPGKGLEWVGLIRSKADGYTTEYAASV
KGRFTISRDDSQSIAYLQMNSLKTEDTAVYYCARDAAYYSYYSPEGAMDYWGQGTLVTVSSGGGGS
GGGGSGGGGSDIVMTQSPSSVSASVGDRVTITCRASQNVDSAVAWYQQKPGKAPKALIYSASYRYS
GVPSRFSGRGSGTDFTLTISSLQPEDFATYYCQQYYSTPWTFGQGTKVEIKRTTTPAPRPPTPAPTIAS
QPLSLRPEACRPAAGGAVHTRGLDFACDIYIWAPLAGTCGVLLLSLVITLYCKRGRKKLLYIFKQPFMR
PVQTTQEEDGCSCRFPEEEEGGCELRVKFSRSADAPAYQQGQNQLYNELNLGRREEYDVLDKRRGR
DPEMGGKPRRKNPQEGLYNELQKDKMAEAYSEIGMKGERRRGKGHDGLYQGLSTATKDTYDALH
MQALPPR.
(SEQ ID NO 173)
EVQLVESGGGLVQPGRSLRLSCTASGFTFTDYYMSWVRQAPGKGLEWVGLIRSKADGYTTEYSASV
KGRFTISRDDSQSIAYLQMNSLKTEDTAVYYCARDAAYYSYYSPEGAMDYWGQGTLVTVSSGGGGS
GGGGSGGGGSDIQMTQSPSSVSASVGDRVTITCKASQNVDSAVAWYQQKPGKAPKLLIYSASYRYS
GVPSRFSGSGSGTDFTLTISSLQPEDFATYYCQQYYSTPWTFGQGTKVEIKRTTTPAPRPPTPAPTIAS
QPLSLRPEACRPAAGGAVHTRGLDFACDIYIWAPLAGTCGVLLLSLVITLYCKRGRKKLLYIFKQPFMR
PVQTTQEEDGCSCRFPEEEEGGCELRVKFSRSADAPAYQQGQNQLYNELNLGRREEYDVLDKRRGR
DPEMGGKPRRKNPQEGLYNELQKDKMAEAYSEIGMKGERRRGKGHDGLYQGLSTATKDTYDALH
MQALPPR.
(SEQ ID NO 174)
EVQLVESGGGLVQPGRSLRLSCTASGFTFTDYYMSWVRQAPGKGLEWVGLIRSKADGYTTEYAASV
KGRFTISRDDSQSIAYLQMNSLKTEDTAVYYCARDAAYYSYYSPEGAMDYWGQGTLVTVSSGGGGS
GGGGSGGGGSDIQMTQSPSSVSASVGDRVTITCRASQNVDSAVAWYQQKPGKAPKALIYSASYRY
SGVPSRFSGSGSGTDFTLTISSLQPEDFATYYCQQYYSTPWTFGQGTKVEIKRTTTPAPRPPTPAPTIA
SQPLSLRPEACRPAAGGAVHTRGLDFACDIYIWAPLAGTCGVLLLSLVITLYCKRGRKKLLYIFKQPFM
RPVQTTQEEDGCSCRFPEEEEGGCELRVKFSRSADAPAYQQGQNQLYNELNLGRREEYDVLDKRRG
RDPEMGGKPRRKNPQEGLYNELQKDKMAEAYSEIGMKGERRRGKGHDGLYQGLSTATKDTYDAL
HMQALPPR.
(SEQ ID NO 175)
EVQLVESGGGLVQPGRSLRLSCTASGFTFTDYYMSWVRQAPGKGLEWVGLIRSKADGYTTEYSASV
KGRFTISRDDSQSIAYLQMNSLKTEDTAVYYCARDAAYYSYYSPEGAMDYWGQGTLVTVSSGGGGS
GGGGSGGGGSDIQMTQSPSSVSASVGDRVTITCRASQNVDSAVAWYQQKPGKAPKALIYSASYRY
SGVPSRFSGSGSGTDFTLTISSLQPEDLATYYCQQYYSTPWTFGQGTKVEIKRTTTPAPRPPTPAPTIA
SQPLSLRPEACRPAAGGAVHTRGLDFACDIYIWAPLAGTCGVLLLSLVITLYCKRGRKKLLYIFKQPFM
RPVQTTQEEDGCSCRFPEEEEGGCELRVKFSRSADAPAYQQGQNQLYNELNLGRREEYDVLDKRRG
RDPEMGGKPRRKNPQEGLYNELQKDKMAEAYSEIGMKGERRRGKGHDGLYQGLSTATKDTYDAL
HMQALPPR.
(SEQ ID NO 176)
EVQLVESGGGLVQPGRSLRLSCTASGFTFTDYYMSWVRQAPGKGLEWVGLIRSKADGYTTEYSASV
KGRFTISRDDSKSILYLQMNSLKTEDTAVYYCARDAAYYSYYSPEGAMDYWGQGTLVTVSSGGGGS
GGGGSGGGGSDIQMTQSPSSVSASVGDRVTITCRASQNVDSAVAWYQQKPGKAPKALIYSASYRY
SGVPSRFSGSGSGTDFTLTISSLQPEDFATYYCQQYYSTPWTFGQGTKVEIKRTTTPAPRPPTPAPTIA
SQPLSLRPEACRPAAGGAVHTRGLDFACDIYIWAPLAGTCGVLLLSLVITLYCKRGRKKLLYIFKQPFM
RPVQTTQEEDGCSCRFPEEEEGGCELRVKFSRSADAPAYQQGQNQLYNELNLGRREEYDVLDKRRG
RDPEMGGKPRRKNPQEGLYNELQKDKMAEAYSEIGMKGERRRGKGHDGLYQGLSTATKDTYDAL
HMQALPPR.
(SEQ ID NO 177)
EVQLVESGGGLVQPGRSLRLSCTASGFTFTDYYMSWVRQAPGKGLEWVGLIRSKADGYTTEYAASV
KGRFTISRDDSQSIAYLQMNSLKTEDTAVYYCARDAAYYSYYSPEGAMDYWGQGTLVTVSSGGGGS
GGGGSGGGGSDIQMTQSPSSVSASVGDRVTITCKASQNVDSAVAWYQQKPGKAPKALIYSASYRY
SGVPDRFSGSGSGTDFTLTISSLQPEDLATYYCQQYYSTPWTFGQGTKVEIKRTTTPAPRPPTPAPTIA
SQPLSLRPEACRPAAGGAVHTRGLDFACDIYIWAPLAGTCGVLLLSLVITLYCKRGRKKLLYIFKQPFM
RPVQTTQEEDGCSCRFPEEEEGGCELRVKFSRSADAPAYQQGQNQLYNELNLGRREEYDVLDKRRG
RDPEMGGKPRRKNPQEGLYNELQKDKMAEAYSEIGMKGERRRGKGHDGLYQGLSTATKDTYDAL
HMQALPPR.
(SEQ ID NO 178)
EVQLVESGGGLVQPGRSLRLSCTASGFTFTDYYMSWVRQAPGKGLEWVGLIRSKADGYTTEYSASV
KGRFTISRDDSQSIAYLQMNSLKTEDTAVYYCARDAAYYSYYSPEGAMDYWGQGTLVTVSSGGGGS
GGGGSGGGGSDIQMTQSPSSVSASVGDRVTITCRASQNVDSAVAWYQQKPGKAPKALIYSASYRY
SGVPSRFSGSGSGTDFTLTISSLQPEDFATYYCQQYYSTPWTFGQGTKVEIKRTTTPAPRPPTPAPTIA
SQPLSLRPEACRPAAGGAVHTRGLDFACDIYIWAPLAGTCGVLLLSLVITLYCKRGRKKLLYIFKQPFM
RPVQTTQEEDGCSCRFPEEEEGGCELRVKFSRSADAPAYQQGQNQLYNELNLGRREEYDVLDKRRG
RDPEMGGKPRRKNPQEGLYNELQKDKMAEAYSEIGMKGERRRGKGHDGLYQGLSTATKDTYDAL
HMQALPPR.
(SEQ ID NO 179)
EVQLVESGGGLVQPGRSLRLSCTASGFTFTDYYMSWVRQAPGKGLEWVGLIRSKADGYTTEYSASV
KGRFTISRDDSKSILYLQMNSLKTEDTAVYYCARDAAYYSYYSPEGAMDYWGQGTLVTVSSGGGGS
GGGGSGGGGSDIVMTQSPSSVSASVGDRVTITCRASQNVDSAVAWYQQKPGKAPKALIYSASYRYS
GVPSRFSGRGSGTDFTLTISSLQPEDFATYYCQQYYSTPWTFGQGTKVEIKRTTTPAPRPPTPAPTIAS
QPLSLRPEACRPAAGGAVHTRGLDFACDIYIWAPLAGTCGVLLLSLVITLYCKRGRKKLLYIFKQPFMR
PVQTTQEEDGCSCRFPEEEEGGCELRVKFSRSADAPAYQQGQNQLYNELNLGRREEYDVLDKRRGR
DPEMGGKPRRKNPQEGLYNELQKDKMAEAYSEIGMKGERRRGKGHDGLYQGLSTATKDTYDALH
MQALPPR.
(SEQ ID NO 180)
EVQLVESGGGLVQPGRSLRLSCTASGFTFTDYYMSWVRQAPGKGLEWVGLIRSKADGYTTEYAASV
KGRFTISRDDSQSIAYLQMNSLKTEDTAVYYCARDAAYYSYYSPEGAMDYWGQGTLVTVSSGGGGS
GGGGSGGGGSDIVMTQSPSSVSASVGDRVTITCRASQNVDSAVAWYQQKPGKAPKALIYSASYRYS
GVPSRFSGRGSGTDFTLTISSLQPEDFATYYCQQYYSTPWTFGQGTKVEIKREPKSPDKTHTCPPCPA
PPVAGPSVFLFPPKPKDTLMIARTPEVTCVVVDVSHEDPEVKFNWYVDGVEVHNAKTKPREEQYNS
TYRVVSVLTVLHQDWLNGKEYKCKVSNKALPAPIEKTISKAKGQPREPQVYTLPPSRDELTKNQVSLT
CLVKGFYPSDIAVEWESNGQPENNYKTTPPVLDSDGSFFLYSKLTVDKSRWQQGNVFSCSVMHEAL
HNHYTQKSLSLSPGKIYIWAPLAGTCGVLLLSLVITLYCKRGRKKLLYIFKQPFMRPVQTTQEEDGCSC
RFPEEEEGGCELRVKFSRSADAPAYQQGQNQLYNELNLGRREEYDVLDKRRGRDPEMGGKPRRKN
PQEGLYNELQKDKMAEAYSEIGMKGERRRGKGHDGLYQGLSTATKDTYDALHMQALPPR.
(SEQ ID NO 181)
EVQLVESGGGLVQPGRSLRLSCTASGFTFTDYYMSWVRQAPGKGLEWVGLIRSKADGYTTEYSASV
KGRFTISRDDSQSIAYLQMNSLKTEDTAVYYCARDAAYYSYYSPEGAMDYWGQGTLVTVSSGGGGS
GGGGSGGGGSDIQMTQSPSSVSASVGDRVTITCKASQNVDSAVAWYQQKPGKAPKLLIYSASYRYS
GVPSRFSGSGSGTDFTLTISSLQPEDFATYYCQQYYSTPWTFGQGTKVEIKREPKSPDKTHTCPPCPA
PPVAGPSVFLFPPKPKDTLMIARTPEVTCVVVDVSHEDPEVKFNWYVDGVEVHNAKTKPREEQYNS
TYRVVSVLTVLHQDWLNGKEYKCKVSNKALPAPIEKTISKAKGQPREPQVYTLPPSRDELTKNQVSLT
CLVKGFYPSDIAVEWESNGQPENNYKTTPPVLDSDGSFFLYSKLTVDKSRWQQGNVFSCSVMHEAL
HNHYTQKSLSLSPGKIYIWAPLAGTCGVLLLSLVITLYCKRGRKKLLYIFKQPFMRPVQTTQEEDGCSC
RFPEEEEGGCELRVKFSRSADAPAYQQGQNQLYNELNLGRREEYDVLDKRRGRDPEMGGKPRRKN
PQEGLYNELQKDKMAEAYSEIGMKGERRRGKGHDGLYQGLSTATKDTYDALHMQALPPR.
(SEQ ID NO 182)
EVQLVESGGGLVQPGRSLRLSCTASGFTFTDYYMSWVRQAPGKGLEWVGLIRSKADGYTTEYAASV
KGRFTISRDDSQSIAYLQMNSLKTEDTAVYYCARDAAYYSYYSPEGAMDYWGQGTLVTVSSGGGGS
GGGGSGGGGSDIQMTQSPSSVSASVGDRVTITCRASQNVDSAVAWYQQKPGKAPKALIYSASYRY
SGVPSRFSGSGSGTDFTLTISSLQPEDFATYYCQQYYSTPWTFGQGTKVEIKREPKSPDKTHTCPPCP
APPVAGPSVFLFPPKPKDTLMIARTPEVTCVVVDVSHEDPEVKFNWYVDGVEVHNAKTKPREEQYN
STYRVVSVLTVLHQDWLNGKEYKCKVSNKALPAPIEKTISKAKGQPREPQVYTLPPSRDELTKNQVSL
TCLVKGFYPSDIAVEWESNGQPENNYKTTPPVLDSDGSFFLYSKLTVDKSRWQQGNVFSCSVMHEA
LHNHYTQKSLSLSPGKIYIWAPLAGTCGVLLLSLVITLYCKRGRKKLLYIFKQPFMRPVQTTQEEDGCS
CRFPEEEEGGCELRVKFSRSADAPAYQQGQNQLYNELNLGRREEYDVLDKRRGRDPEMGGKPRRK
NPQEGLYNELQKDKMAEAYSEIGMKGERRRGKGHDGLYQGLSTATKDTYDALHMQALPPR.
(SEQ ID NO 183)
EVQLVESGGGLVQPGRSLRLSCTASGFTFTDYYMSWVRQAPGKGLEWVGLIRSKADGYTTEYSASV
KGRFTISRDDSQSIAYLQMNSLKTEDTAVYYCARDAAYYSYYSPEGAMDYWGQGTLVTVSS
GGGGSGGGGSGGGGSDIQMTQSPSSVSASVGDRVTITCRASQNVDSAVAWYQQKPGKAPKALIY
SASYRYSGVPSRFSGSGSGTDFTLTISSLQPEDLATYYCQQYYSTPWTFGQGTKVEIKREPKSPDKTHT
CPPCPAPPVAGPSVFLFPPKPKDTLMIARTPEVTCVVVDVSHEDPEVKFNWYVDGVEVHNAKTKPR
EEQYNSTYRVVSVLTVLHQDWLNGKEYKCKVSNKALPAPIEKTISKAKGQPREPQVYTLPPSRDELTK
NQVSLTCLVKGFYPSDIAVEWESNGQPENNYKTTPPVLDSDGSFFLYSKLTVDKSRWQQGNVFSCS
VMHEALHNHYTQKSLSLSPGKIYIWAPLAGTCGVLLLSLVITLYCKRGRKKLLYIFKQPFMRPVQTTQE
EDGCSCRFPEEEEGGCELRVKFSRSADAPAYQQGQNQLYNELNLGRREEYDVLDKRRGRDPEMGG
KPRRKNPQEGLYNELQKDKMAEAYSEIGMKGERRRGKGHDGLYQGLSTATKDTYDALHMQALPPR.
(SEQ ID NO 184)
EVQLVESGGGLVQPGRSLRLSCTASGFTFTDYYMSWVRQAPGKGLEWVGLIRSKADGYTTEYSASV
KGRFTISRDDSKSILYLQMNSLKTEDTAVYYCARDAAYYSYYSPEGAMDYWGQGTLVTVSSGGGGS
GGGGSGGGGSDIQMTQSPSSVSASVGDRVTITCRASQNVDSAVAWYQQKPGKAPKALIYSASYRY
SGVPSRFSGSGSGTDFTLTISSLQPEDFATYYCQQYYSTPWTFGQGTKVEIKREPKSPDKTHTCPPCP
APPVAGPSVFLFPPKPKDTLMIARTPEVTCVVVDVSHEDPEVKFNWYVDGVEVHNAKTKPREEQYN
STYRVVSVLTVLHQDWLNGKEYKCKVSNKALPAPIEKTISKAKGQPREPQVYTLPPSRDELTKNQVSL
TCLVKGFYPSDIAVEWESNGQPENNYKTTPPVLDSDGSFFLYSKLTVDKSRWQQGNVFSCSVMHEA
LHNHYTQKSLSLSPGKIYIWAPLAGTCGVLLLSLVITLYCKRGRKKLLYIFKQPFMRPVQTTQEEDGCS
CRFPEEEEGGCELRVKFSRSADAPAYQQGQNQLYNELNLGRREEYDVLDKRRGRDPEMGGKPRRK
NPQEGLYNELQKDKMAEAYSEIGMKGERRRGKGHDGLYQGLSTATKDTYDALHMQALPPR.
(SEQ ID NO 185)
EVQLVESGGGLVQPGRSLRLSCTASGFTFTDYYMSWVRQAPGKGLEWVGLIRSKADGYTTEYAASV
KGRFTISRDDSQSIAYLQMNSLKTEDTAVYYCARDAAYYSYYSPEGAMDYWGQGTLVTVSSGGGGS
GGGGSGGGGSDIQMTQSPSSVSASVGDRVTITCKASQNVDSAVAWYQQKPGKAPKALIYSASYRY
SGVPDRFSGSGSGTDFTLTISSLQPEDLATYYCQQYYSTPWTFGQGTKVEIKREPKSPDKTHTCPPCP
APPVAGPSVFLFPPKPKDTLMIARTPEVTCVVVDVSHEDPEVKFNWYVDGVEVHNAKTKPREEQYN
STYRVVSVLTVLHQDWLNGKEYKCKVSNKALPAPIEKTISKAKGQPREPQVYTLPPSRDELTKNQVSL
TCLVKGFYPSDIAVEWESNGQPENNYKTTPPVLDSDGSFFLYSKLTVDKSRWQQGNVFSCSVMHEA
LHNHYTQKSLSLSPGKIYIWAPLAGTCGVLLLSLVITLYCKRGRKKLLYIFKQPFMRPVQTTQEEDGCS
CRFPEEEEGGCELRVKFSRSADAPAYQQGQNQLYNELNLGRREEYDVLDKRRGRDPEMGGKPRRK
NPQEGLYNELQKDKMAEAYSEIGMKGERRRGKGHDGLYQGLSTATKDTYDALHMQALPPR.
(SEQ ID NO 186)
EVQLVESGGGLVQPGRSLRLSCTASGFTFTDYYMSWVRQAPGKGLEWVGLIRSKADGYTTEYSASV
KGRFTISRDDSQSIAYLQMNSLKTEDTAVYYCARDAAYYSYYSPEGAMDYWGQGTLVTVSSGGGGS
GGGGSGGGGSDIQMTQSPSSVSASVGDRVTITCRASQNVDSAVAWYQQKPGKAPKALIYSASYRY
SGVPSRFSGSGSGTDFTLTISSLQPEDFATYYCQQYYSTPWTFGQGTKVEIKREPKSPDKTHTCPPCP
APPVAGPSVFLFPPKPKDTLMIARTPEVTCVVVDVSHEDPEVKFNWYVDGVEVHNAKTKPREEQYN
STYRVVSVLTVLHQDWLNGKEYKCKVSNKALPAPIEKTISKAKGQPREPQVYTLPPSRDELTKNQVSL
TCLVKGFYPSDIAVEWESNGQPENNYKTTPPVLDSDGSFFLYSKLTVDKSRWQQGNVFSCSVMHEA
LHNHYTQKSLSLSPGKIYIWAPLAGTCGVLLLSLVITLYCKRGRKKLLYIFKQPFMRPVQTTQEEDGCS
CRFPEEEEGGCELRVKFSRSADAPAYQQGQNQLYNELNLGRREEYDVLDKRRGRDPEMGGKPRRK
NPQEGLYNELQKDKMAEAYSEIGMKGERRRGKGHDGLYQGLSTATKDTYDALHMQALPPR.
(SEQ ID NO 187)
EVQLVESGGGLVQPGRSLRLSCTASGFTFTDYYMSWVRQAPGKGLEWVGLIRSKADGYTTEYSASV
KGRFTISRDDSKSILYLQMNSLKTEDTAVYYCARDAAYYSYYSPEGAMDYWGQGTLVTVSSGGGGS
GGGGSGGGGSDIVMTQSPSSVSASVGDRVTITCRASQNVDSAVAWYQQKPGKAPKALIYSASYRYS
GVPSRFSGRGSGTDFTLTISSLQPEDFATYYCQQYYSTPWTFGQGTKVEIKREPKSPDKTHTCPPCPA
PPVAGPSVFLFPPKPKDTLMIARTPEVTCVVVDVSHEDPEVKFNWYVDGVEVHNAKTKPREEQYNS
TYRVVSVLTVLHQDWLNGKEYKCKVSNKALPAPIEKTISKAKGQPREPQVYTLPPSRDELTKNQVSLT
CLVKGFYPSDIAVEWESNGQPENNYKTTPPVLDSDGSFFLYSKLTVDKSRWQQGNVFSCSVMHEAL
HNHYTQKSLSLSPGKIYIWAPLAGTCGVLLLSLVITLYCKRGRKKLLYIFKQPFMRPVQTTQEEDGCSC
RFPEEEEGGCELRVKFSRSADAPAYQQGQNQLYNELNLGRREEYDVLDKRRGRDPEMGGKPRRKN
PQEGLYNELQKDKMAEAYSEIGMKGERRRGKGHDGLYQGLSTATKDTYDALHMQALPPR.

[0647] According to the present invention these anti-CD123 CAR can include at least one mimotope.

### REFERENCES

[0648] Arimondo, P. B., C. J. Thomas, et al. (2006). “Exploring the cellular activity of camptothecin-triple-helix-forming oligonucleotide conjugates.” Mol Cell Biol 26(1): 324-33.
[0649] Atkins, J. F., N. M. Wills, et al. (2007). “A case for “StopGo”: reprogramming translation to augment codon meaning of GGN by promoting unconventional termination (Stop) after addition of glycine and then allowing continued translation (Go).” Rna 13(6): 803-10.
[0650] Bardenheuer, W., K. Lehmberg, et al. (2005). “Resistance to cytarabine and gemcitabine and in vitro selection of transduced cells after retroviral expression of cytidine deaminase in human hematopoietic progenitor cells.” Leukemia 19(12): 2281-8.
[0651] Betts, M. R., J. M. Brenchley, et al. (2003). “Sensitive and viable identification of antigen-specific CD8+ T cells by a flow cytometric assay for degranulation.” J Immunol Methods 281(1-2): 65-78.
[0652] Bierer, B. E., G. Hollander, et al. (1993). “Cyclosporin A and FK506: molecular mechanisms of immunosuppression and probes for transplantation biology.” Curr Opin Immunol 5(5): 763-73.
[0653] Boch, J., H. Scholze, et al. (2009). “Breaking the code of DNA binding specificity of TAL-type III effectors.” Science 326(5959): 1509-12.
[0654] Brewin, J., C. Mancao, et al. (2009). “Generation of EBV-specific cytotoxic T cells that are resistant to calcineurin inhibitors for the treatment of posttransplantation lymphoproliferative disease.” Blood 114(23): 4792-803.
[0655] Choulika, A., A. Perrin, et al. (1995). “Induction of homologous recombination in mammalian chromosomes by using the I-SceI system of Saccharomyces cerevisiae.” Mol Cell Biol 15(4): 1968-73.
[0656] Christian, M., T. Cermak, et al. (2010). “Targeting DNA double-strand breaks with TAL effector nucleases.” Genetics 186(2): 757-61.
[0657] Cong, L., F. A. Ran, et al. (2013). “Multiplex genome engineering using CRISPR/Cas systems.” Science 339(6121): 819-23.
[0658] Critchlow, S. E. and S. P. Jackson (1998). “DNA end-joining: from yeast to man.” Trends Biochem Sci 23(10): 394-8.
[0659] Dasgupta, A., D. McCarty, et al. (2011). “Engineered drug-resistant immunocompetent cells enhance tumor cell killing during a chemotherapy challenge.” Biochem Biophys Res Commun 391(1): 170-5.
[0660] Deltcheva, E., K. Chylinski, et al. (2011). “CRISPR RNA maturation by trans-encoded small RNA and host factor RNase III.” Nature 471(7340): 602-7.
[0661] Deng, D., C. Yan, et al. (2012). “Structural basis for sequence-specific recognition of DNA by TAL effectors.” Science 335(6069): 720-3.
[0662] Donnelly, M. and G. Elliott (2001). “Nuclear localization and shuttling of herpes simplex virus tegument protein VP13/14.” J Virol 75(6): 2566-74.
[0663] Doronina, V. A., C. Wu, et al. (2008). “Site-specific release of nascent chains from ribosomes at a sense codon.” Mol Cell Biol 28(13): 4227-39.
[0664] Eisenschmidt, K., T. Lanio, et al. (2005). “Developing a programmed restriction endonuclease for highly specific DNA cleavage.” Nucleic Acids Res 33(22): 7039-47.
[0665] Garneau, J. E., M. E. Dupuis, et al. (2010). “The CRISPR/Cas bacterial immune system cleaves bacteriophage and plasmid DNA.” Nature 468(7320): 67-71.
[0666] Gasiunas, G., R. Barrangou, et al. (2012). “Cas9-crRNA ribonucleoprotein complex mediates specific DNA cleavage for adaptive immunity in bacteria.” Proc Natl Acad Sci USA 109(39): E2579-86.
[0667] Geissler, R., H. Scholze, et al. (2011). “Transcriptional activators of human genes with programmable DNA-specificity.” PLoS One 6(5): e19509.
[0668] Hacke, K., J. A. Treger, et al. (2013). “Genetic modification of mouse bone marrow by lentiviral vector-mediated delivery of hypoxanthine-Guanine phosphoribosyltransferase short hairpin RNA confers chemoprotection against 6-thioguanine cytotoxicity.” Transplant Proc 45(5): 2040-4.
[0669] Henderson, D. J., I. Naya, et al. (1991). “Comparison of the effects of FK-506, cyclosporin A and rapamycin on IL-2 production.” Immunology 73(3): 316-21.
[0670] Huang, P., A. Xiao, et al. (2011). “Heritable gene targeting in zebrafish using customized TALENs.” Nat Biotechnol 29(8): 699-700.
[0671] Jena, B., G. Dotti, et al. (2010). “Redirecting T-cell specificity by introducing a tumor-specific chimeric antigen receptor.” Blood 116(7): 1035-44.
[0672] Jinek, M., K. Chylinski, et al. (2012). “A programmable dual-RNA-guided DNA endonuclease in adaptive bacterial immunity.” Science 337(6096): 816-21.
[0673] Jonnalagadda, M., C. E. Brown, et al. (2013). “Engineering human T cells for resistance to methotrexate and mycophenolate mofetil as an in vivo cell selection strategy.” PLoS One 8(6): e65519.
[0674] Kalish, J. M. and P. M. Glazer (2005). “Targeted genome modification via triple helix formation.” Ann N Y Acad Sci 1058: 151-61.
[0675] Kushman, M. E., S. L. Kabler, et al. (2007). “Expression of human glutathione S-transferase P1 confers resistance to benzo[a]pyrene or benzo[a]pyrene-7,8-dihydrodiol mutagenesis, macromolecular alkylation and formation of stable N2-Gua-BPDE adducts in stably transfected V79MZ cells co-expressing hCYP1A1.” Carcinogenesis 28(1): 207-14.
[0676] Li, L., M. J. Piatek, et al. (2012). “Rapid and highly efficient construction of TALE-based transcriptional regulators and nucleases for genome modification.” Plant Mol Biol 78(4-5): 407-16.
[0677] Li, T., S. Huang, et al. (2011). “TAL nucleases (TALN5): hybrid proteins composed of TAL effectors and Fokl DNA-cleavage domain.” Nucleic Acids Res 39(1): 359-72.
[0678] Li, T., S. Huang, et al. (2011). “Modularly assembled designer TAL effector nucleases for targeted gene knockout and gene replacement in eukaryotes.” Nucleic Acids Res 39(14): 6315-25.
[0679] Liu, J., M. W. Albers, et al. (1992). “Inhibition of T cell signaling by immunophilin-ligand complexes correlates with loss of calcineurin phosphatase activity.” Biochemistry 31(16): 3896-901.
[0680] Ma, J. L., E. M. Kim, et al. (2003). “Yeast Mre11 and Rad1 proteins define a Ku-independent mechanism to repair double-strand breaks lacking overlapping end sequences.” Mol Cell Biol 23(23): 8820-8.
[0681] Mahfouz, M. M., L. Li, et al. (2012). “Targeted transcriptional repression using a chimeric TALE-SRDX repressor protein.” Plant Mol Biol 78(3): 311-21.
[0682] Mahfouz, M. M., L. Li, et al. (2011). “De novo-engineered transcription activator-like effector (TALE) hybrid nuclease with novel DNA binding specificity creates double-strand breaks.” Proc Natl Acad Sci USA 108(6): 2623-8.
[0683] Mak, A. N., P. Bradley, et al. (2012). “The crystal structure of TAL effector PthXo1 bound to its DNA target.” Science 335(6069): 716-9.
[0684] Mali, P., L. Yang, et al. (2013). “RNA-guided human genome engineering via Cas9.” Science 339(6121): 823-6.
[0685] Miller, J. C., S. Tan, et al. (2011). “A TALE nuclease architecture for efficient genome editing.” Nat Biotechnol 29(2): 143-8.
[0686] Morbitzer, R., P. Romer, et al. (2011). “Regulation of selected genome loci using de novo-engineered transcription activator-like effector (TALE)-type transcription factors.” Proc Natl Acad Sci USA 107(50): 21617-22.
[0687] Moscou, M. J. and A. J. Bogdanove (2009). “A simple cipher governs DNA recognition by TAL effectors.” Science 326(5959): 1501.
[0688] Mussolino, C., R. Morbitzer, et al. (2011). “A novel TALE nuclease scaffold enables high genome editing activity in combination with low toxicity.” Nucleic Acids Res 39(21): 9283-93.
[0689] Nivens, M. C., T. Felder, et al. (2004). “Engineered resistance to camptothecin and antifolates by retroviral coexpression of tyrosyl DNA phosphodiesterase-I and thymidylate synthase.” Cancer Chemother Pharmacol 53(2): 107-15.
[0690] Paques, F. and P. Duchateau (2007). “Meganucleases and DNA double-strand break-induced recombination: perspectives for gene therapy.” Curr Gene Ther 7(1): 49-66.
[0691] Park, T. S., S. A. Rosenberg, et al. (2011). “Treating cancer with genetically engineered T cells.” Trends Biotechnol 29(11): 550-7.
[0692] Peipp, M., D. Saul, et al. (2004). “Efficient eukaryotic expression of fluorescent scFv fusion proteins directed against CD antigens for FACS applications.” J Immunol Methods 285(2): 265-80.
[0693] Perrin, A., M. Buckle, et al. (1993). “Asymmetrical recognition and activity of the I-SceI endonuclease on its site and on intron-exon junctions.” Embo J 12(7): 2939-47.
[0694] Pingoud, A. and G. H. Silva (2007). “Precision genome surgery.” Nat Biotechnol 25(7): 743-4.
[0695] Porteus, M. H. and D. Carroll (2005). “Gene targeting using zinc finger nucleases.” Nat Biotechnol 23(8): 967-73.
[0696] Rouet, P., F. Smih, et al. (1994). “Introduction of double-strand breaks into the genome of mouse cells by expression of a rare-cutting endonuclease.” Mol Cell Biol 14(12): 8096-106.
[0697] Sander, J. D., L. Cade, et al. (2011). “Targeted gene disruption in somatic zebrafish cells using engineered TALENs.” Nat Biotechnol 29(8): 697-8.
[0698] Sangiolo, D., M. Lesnikova, et al. (2007). “Lentiviral vector conferring resistance to mycophenolate mofetil and sensitivity to ganciclovir for in vivo T-cell selection.” Gene Ther 14(21): 1549-54.
[0699] Schweitzer, B. I., A. P. Dicker, et al. (1990). “Dihydrofolate reductase as a therapeutic target.” Faseb J 4(8): 2441-52.
[0700] Sorek, R., C. M. Lawrence, et al. (2013). “CRISPR-mediated Adaptive Immune Systems in Bacteria and Archaea.” Annu Rev Biochem.
[0701] Stoddard, B. L. (2005). “Homing endonuclease structure and function.” Q Rev Biophys 38(1): 49-95.
[0702] Sugimoto, Y., S. Tsukahara, et al. (2003). “Drug-selected co-expression of P-glycoprotein and gp91 in vivo from an MDR1-bicistronic retrovirus vector Ha-MDR-IRES-gp91.” J Gene Med 5(5): 366-76.
[0703] Takebe, N., S. C. Zhao, et al. (2001). “Generation of dual resistance to 4-hydroperoxycyclophosphamide and methotrexate by retroviral transfer of the human aldehyde dehydrogenase class 1 gene and a mutated dihydrofolate reductase gene.” Mol Ther 3(1): 88-96.
[0704] Tesson, L., C. Usal, et al. (2011). “Knockout rats generated by embryo microinjection of TALENs.” Nat Biotechnol 29(8): 695-6.
[0705] Weber, E., R. Gruetzner, et al. (2011). “Assembly of designer TAL effectors by Golden Gate cloning.” PLoS One 6(5): e19722.
[0706] Yam, P., M. Jensen, et al. (2006). “Ex vivo selection and expansion of cells based on expression of a mutated inosine monophosphate dehydrogenase 2 after HIV vector transduction: effects on lymphocytes, monocytes, and CD34+ stem cells.” Mol Ther 14(2): 236-44.
[0707] Zhang, F., L. Cong, et al. (2011). “Efficient construction of sequence-specific TAL effectors for modulating mammalian transcription.” Nat Biotechnol 29(2): 149-53.
[0708] Zielske, S. P., J. S. Reese, et al. (2003). “In vivo selection of MGMT(P140K) lentivirus-transduced human NOD/SCID repopulating cells without pretransplant irradiation conditioning.” J Clin Invest 112(10)1561-70.

1. The CD123 specific chimeric antigen receptor (CAR) comprising
an extracellular domain comprising an extra cellular ligand binding-domain comprising successively, a VH optionally humanized, a linker, a VL optionally humanized, and a hinge,
a transmembrane domain,
a cytoplasmic domain, and
at least one epitope specific for a monoclonal antibody (mimotope).

2. The CD123 CAR according to claim 1 comprising
an extracellular domain comprising an extra cellular ligand binding-domain comprising successively, a VH of SEQ ID NO 12, SEQ ID NO 24, SEQ ID NO 25, SEQ ID NO 26, SEQ ID NO 27, SEQ ID NO 28, SEQ ID NO 29 or SEQ ID NO 30, optionally humanized, a linker, a VL of SEQ ID NO 11, SEQ ID NO 18, SEQ ID NO 19, SEQ ID NO 20, SEQ ID NO 21, SEQ ID NO 22 or SEQ ID NO 23, optionally humanized, and a hinge,
a transmembrane domain from CD8 alpha, and
a cytoplasmic domain including a CD3 zeta signaling domain and a co-stimulatory domain from 4-1BB.

3. The CD123 CAR according to claim 1, wherein the CAR lacks a sequence having identity to human CD28 NP_006130.1.

4. The CD123 CAR according to claim 1 comprising a sequence of SEQ ID NO 172, SEQ ID NO 173, SEQ ID NO 174, SEQ ID NO 175, SEQ ID NO 176, SEQ ID NO 177, SEQ ID NO 178, SEQ ID NO 179, SEQ ID NO 180, SEQ ID NO 181, SEQ ID NO 182, SEQ ID NO 183, SEQ ID NO 184, SEQ ID NO 185, SEQ ID NO 186 and SEQ ID NO 187, optionally further comprising at least one SEQ ID NO 161.

5. The CD123 CAR according to claim 1, wherein said extracellular ligand binding-domain comprises at least one epitope specific for a monoclonal antibody (mimotope) of SEQ ID NO 161, SEQ ID NO 162, SEQ ID NO 163, SEQ ID NO 164, SEQ ID NO 165, SEQ ID NO 166, SEQ ID NO 167, SEQ ID NO 168, SEQ ID NO 169 or SEQ ID NO 170, preferably of SEQ ID NO 161 and of SEQ ID NO 169.

6. The CD123 CAR according to claim 1 comprising a sequence of SEQ ID NO 160, SEQ ID NO 171, SEQ ID NO 188, SEQ ID NO 189, SEQ ID NO 190, SEQ ID NO 191, SEQ ID NO 192, SEQ ID NO 193, SEQ ID NO 194, SEQ ID NO 195, SEQ ID NO 196, or SEQ ID NO 197.

7. A polynucleotide encoding the CD123 specific CAR according to claim 1.

8. An expression vector comprising the polynucleotide according to claim 7.

9. An expression vector comprising a backbone and at least one sequence encoding the CAR according to claim 6.

10. An expression vector comprising a backbone, an EF1 promotor, an RQR8 open reading frame (RQR8 ORF), a sequence coding any one of the CD123 CAR of claim 6.

11. An engineered immune cell comprising a T Cell Receptor (TCR) knock-out (KO) or TCR and human deoxycytidine kinase (dCK) KO and a CD123 specific CAR according to claim 1, wherein the CAR is expressed on the cell surface of the immune cell.

12. An engineered immune cell comprising a polynucleotide coding a CD123 specific CAR according to claim 7.

13. The engineered immune cell according to claim 11 further expressing a suicide domain at the cell surface.

14. The engineered immune cell according to claim 11, wherein the cell suppresses expression of at least one MHC protein.

15. A method of treating a disease or condition associated with CD123 comprising administering to a subject in need thereof the engineered immune cell according to claim 11.

16. The method of treating according to claim 15, wherein the disease or condition is acute myelogenous leukemia (AML), BPDNL, or during or before bone marrow transplantation.

17. The method according to claim 15, wherein the disease or condition is a lymphoproliferative disorder, acute myelogenous leukemia, chronic myelogenous leukemia, myelodysplastic syndrome, acute lymphoid leukemia, chronic lymphoid leukemia, myelodysplastic syndrome, or BPDNL.

18. The CD123 specific CAR according to claim 1, wherein the linker is a linker of sequence (GGGGS)n, wherein “n” is 1-4.

19. The CD123 specific CAR according to claim 18, wherein “n” is 3.

20. The CD123 specific CAR according to claim 5, wherein the epitope specific for a monoclonal antibody is SEQ ID NO 161 or 169.

21. The method of treating according to claim 16, wherein the AML is refractory AML or relapsed AML.

22. The method of treating according to claim 17, wherein the lymphoproliferative disorder is leukemia or lymphoma.

The application's sequence listing, which the Patent Office published only in electronic form, follows.

SEQUENCE LISTING (212 sequences)

SEQ ID NO: 1 - protein, 21 aa, artificial sequence
  signal peptide
MALPVTALLLPLALLLHAARP

SEQ ID NO: 2 - protein, 20 aa, artificial sequence
  signal peptide
METDTLLLWVLLLWVPGSTG

SEQ ID NO: 3 - protein, 16 aa, homo sapiens
  FcgRIIIa hinge
GLAVSTISSFFPPGYQ

SEQ ID NO: 4 - protein, 45 aa, homo sapiens
  Fragment of T-cell surface glycoprotein CD8 alpha chain isoform 1 precursor (residues 138-206)
TTTPAPRPPTPAPTIASQPLSLRPEACRPAAGGAVHTRGLDFACD

SEQ ID NO: 5 - protein, 231 aa, homo sapiens
  IgG1 hinge
EPKSPDKTHTCPPCPAPPVAGPSVFLFPPKPKDTLMIARTPEVTCVVVDVSHEDPEVKFNWYVDGVEVHNAKTKPREEQYNSTYRVVSVLTVLHQDWLNGKEYKCKVSNKALPAPIEKTISKAKGQPREPQVYTLPPSRDELTKNQVSLTCLVKGFYPSDIAVEWESNGQPENNYKTTPPVLDSDGSFFLYSKLTVDKSRWQQGNVFSCSVMHEALHNHYTQKSLSLSPGK

SEQ ID NO: 6 - protein, 24 aa, homo sapiens
  CD8alpha transmembrane domain
IYIWAPLAGTCGVLLLSLVITLYC

SEQ ID NO: 7 - protein, 27 aa, homo sapiens
  41BB transmembrane domain
IISFFLALTSTALLFLLFFLTLRFSVV

SEQ ID NO: 8 - protein, 42 aa, homo sapiens
  Fragment of 4-1BB (residues 214-255)
KRGRKKLLYIFKQPFMRPVQTTQEEDGCSCRFPEEEEGGCEL

SEQ ID NO: 9 - protein, 112 aa, homo sapiens
  fragment of T-cell surface glycoprotein CD3 zeta chain
RVKFSRSADAPAYQQGQNQLYNELNLGRREEYDVLDKRRGRDPEMGGKPRRKNPQEGLYNELQKDKMAEAYSEIGMKGERRRGKGHDGLYQGLSTATKDTYDALHMQALPPR

SEQ ID NO: 10 - protein, 15 aa, artificial sequence
  linker
GGGGSGGGGSGGGGS

SEQ ID NO: 11 - protein, 113 aa, artificial sequence
  Klon43 light chain variable region
MADYKDIVMTQSHKFMSTSVGDRVNITCKASQNVDSAVAWYQQKPGQSPKALIYSASYRYSGVPDRFTGRGSGTDFTLTISSVQAEDLAVYYCQQYYSTPWTFGGGTKLEIKR

SEQ ID NO: 12 - protein, 127 aa, artificial sequence
  Klon43 heavy chain variable region
EVKLVESGGGLVQPGGSLSLSCAASGFTFTDYYMSWVRQPPGKALEWLALIRSKADGYTTEYSASVKGRFTLSRDDSQSILYLQMNALRPEDSATYYCARDAAYYSYYSPEGAMDYWGQGTSVTVSS

SEQ ID NO: 13 - DNA, 49 bp, Artificial sequence
  Target TALEN TRAC_T01
ttgtcccacagatatccagaaccctgaccctgccgtgtaccagctgaga

SEQ ID NO: 14 - protein, 530 aa, Artificial sequence
  TAL binding domain  TRAC_T01-L
LTPQQVVAIASNGGGKQALETVQRLLPVLCQAHGLTPQQVVAIASNNGGKQALETVQRLLPVLCQAHGLTPQQVVAIASNGGGKQALETVQRLLPVLCQAHGLTPEQVVAIASHDGGKQALETVQRLLPVLCQAHGLTPEQVVAIASHDGGKQALETVQRLLPVLCQAHGLTPEQVVAIASHDGGKQALETVQRLLPVLCQAHGLTPEQVVAIASNIGGKQALETVQALLPVLCQAHGLTPEQVVAIASHDGGKQALETVQRLLPVLCQAHGLTPEQVVAIASNIGGKQALETVQALLPVLCQAHGLTPQQVVAIASNNGGKQALETVQRLLPVLCQAHGLTPEQVVAIASNIGGKQALETVQALLPVLCQAHGLTPQQVVAIASNGGGKQALETVQRLLPVLCQAHGLTPEQVVAIASNIGGKQALETVQALLPVLCQAHGLTPQQVVAIASNGGGKQALETVQRLLPVLCQAHGLTPEQVVAIASHDGGKQALETVQRLLPVLCQAHGLTPQQVVAIASNGGGRPALE

SEQ ID NO: 15 - protein, 530 aa, Artificial sequence
  TAL binding domain TRAC_T01-R
LTPEQVVAIASHDGGKQALETVQRLLPVLCQAHGLTPQQVVAIASNGGGKQALETVQRLLPVLCQAHGLTPEQVVAIASHDGGKQALETVQRLLPVLCQAHGLTPEQVVAIASNIGGKQALETVQALLPVLCQAHGLTPQQVVAIASNNGGKQALETVQRLLPVLCQAHGLTPEQVVAIASHDGGKQALETVQRLLPVLCQAHGLTPQQVVAIASNGGGKQALETVQRLLPVLCQAHGLTPQQVVAIASNNGGKQALETVQRLLPVLCQAHGLTPQQVVAIASNNGGKQALETVQRLLPVLCQAHGLTPQQVVAIASNGGGKQALETVQRLLPVLCQAHGLTPEQVVAIASNIGGKQALETVQALLPVLCQAHGLTPEQVVAIASHDGGKQALETVQRLLPVLCQAHGLTPEQVVAIASNIGGKQALETVQALLPVLCQAHGLTPEQVVAIASHDGGKQALETVQRLLPVLCQAHGLTPQQVVAIASNNGGKQALETVQRLLPVLCQAHGLTPQQVVAIASNGGGRPALE

SEQ ID NO: 16 - protein, 2814 aa, Artificial sequence
  TRAC_T01-L TALEN
ATGGGCGATCCTAAAAAGAAACGTAAGGTCATCGATTACCCATACGATGTTCCAGATTACGCTATCGATATCGCCGATCTACGCACGCTCGGCTACAGCCAGCAGCAACAGGAGAAGATCAAACCGAAGGTTCGTTCGACAGTGGCGCAGCACCACGAGGCACTGGTCGGCCACGGGTTTACACACGCGCACATCGTTGCGTTAAGCCAACACCCGGCAGCGTTAGGGACCGTCGCTGTCAAGTATCAGGACATGATCGCAGCGTTGCCAGAGGCGACACACGAAGCGATCGTTGGCGTCGGCAAACAGTGGTCCGGCGCACGCGCTCTGGAGGCCTTGCTCACGGTGGCGGGAGAGTTGAGAGGTCCACCGTTACAGTTGGACACAGGCCAACTTCTCAAGATTGCAAAACGTGGCGGCGTGACCGCAGTGGAGGCAGTGCATGCATGGCGCAATGCACTGACGGGTGCCCCGCTCAACTTGACCCCCCAGCAGGTGGTGGCCATCGCCAGCAATGGCGGTGGCAAGCAGGCGCTGGAGACGGTCCAGCGGCTGTTGCCGGTGCTGTGCCAGGCCCACGGCTTGACCCCCCAGCAGGTGGTGGCCATCGCCAGCAATAATGGTGGCAAGCAGGCGCTGGAGACGGTCCAGCGGCTGTTGCCGGTGCTGTGCCAGGCCCACGGCTTGACCCCCCAGCAGGTGGTGGCCATCGCCAGCAATGGCGGTGGCAAGCAGGCGCTGGAGACGGTCCAGCGGCTGTTGCCGGTGCTGTGCCAGGCCCACGGCTTGACCCCGGAGCAGGTGGTGGCCATCGCCAGCCACGATGGCGGCAAGCAGGCGCTGGAGACGGTCCAGCGGCTGTTGCCGGTGCTGTGCCAGGCCCACGGCTTGACCCCGGAGCAGGTGGTGGCCATCGCCAGCCACGATGGCGGCAAGCAGGCGCTGGAGACGGTCCAGCGGCTGTTGCCGGTGCTGTGCCAGGCCCACGGCTTGACCCCGGAGCAGGTGGTGGCCATCGCCAGCCACGATGGCGGCAAGCAGGCGCTGGAGACGGTCCAGCGGCTGTTGCCGGTGCTGTGCCAGGCCCACGGCTTGACCCCGGAGCAGGTGGTGGCCATCGCCAGCAATATTGGTGGCAAGCAGGCGCTGGAGACGGTGCAGGCGCTGTTGCCGGTGCTGTGCCAGGCCCACGGCTTGACCCCGGAGCAGGTGGTGGCCATCGCCAGCCACGATGGCGGCAAGCAGGCGCTGGAGACGGTCCAGCGGCTGTTGCCGGTGCTGTGCCAGGCCCACGGCTTGACCCCGGAGCAGGTGGTGGCCATCGCCAGCAATATTGGTGGCAAGCAGGCGCTGGAGACGGTGCAGGCGCTGTTGCCGGTGCTGTGCCAGGCCCACGGCTTGACCCCCCAGCAGGTGGTGGCCATCGCCAGCAATAATGGTGGCAAGCAGGCGCTGGAGACGGTCCAGCGGCTGTTGCCGGTGCTGTGCCAGGCCCACGGCTTGACCCCGGAGCAGGTGGTGGCCATCGCCAGCAATATTGGTGGCAAGCAGGCGCTGGAGACGGTGCAGGCGCTGTTGCCGGTGCTGTGCCAGGCCCACGGCTTGACCCCCCAGCAGGTGGTGGCCATCGCCAGCAATGGCGGTGGCAAGCAGGCGCTGGAGACGGTCCAGCGGCTGTTGCCGGTGCTGTGCCAGGCCCACGGCTTGACCCCGGAGCAGGTGGTGGCCATCGCCAGCAATATTGGTGGCAAGCAGGCGCTGGAGACGGTGCAGGCGCTGTTGCCGGTGCTGTGCCAGGCCCACGGCTTGACCCCCCAGCAGGTGGTGGCCATCGCCAGCAATGGCGGTGGCAAGCAGGCGCTGGAGACGGTCCAGCGGCTGTTGCCGGTGCTGTGCCAGGCCCACGGCTTGACCCCGGAGCAGGTGGTGGCCATCGCCAGCCACGATGGCGGCAAGCAGGCGCTGGAGACGGTCCAGCGGCTGTTGCCGGTGCTGTGCCAGGCCCACGGCTTGACCCCTCAGCAGGTGGTGGCCATCGCCAGCAATGGCGGCGGCAGGCCGGCGCTGGAGAGCATTGTTGCCCAGTTATCTCGCCCTGATCCGGCGTTGGCCGCGTTGACCAACGACCACCTCGTCGCCTTGGCCTGCCTCGGCGGGCGTCCTGCGCTGGATGCAGTGAAAAAGGGATTGGGGGATCCTATCAGCCGTTCCCAGCTGGTGAAGTCCGAGCTGGAGGAGAAGAAATCCGAGTTGAGGCACAAGCTGAAGTACGTGCCCCACGAGTACATCGAGCTGATCGAGATCGCCCGGAACAGCACCCAGGACCGTATCCTGGAGATGAAGGTGATGGAGTTCTTCATGAAGGTGTACGGCTACAGGGGCAAGCACCTGGGCGGCTCCAGGAAGCCCGACGGCGCCATCTACACCGTGGGCTCCCCCATCGACTACGGCGTGATCGTGGACACCAAGGCCTACTCCGGCGGCTACAACCTGCCCATCGGCCAGGCCGACGAAATGCAGAGGTACGTGGAGGAGAACCAGACCAGGAACAAGCACATCAACCCCAACGAGTGGTGGAAGGTGTACCCCTCCAGCGTGACCGAGTTCAAGTTCCTGTTCGTGTCCGGCCACTTCAAGGGCAACTACAAGGCCCAGCTGACCAGGCTGAACCACATCACCAACTGCAACGGCGCCGTGCTGTCCGTGGAGGAGCTCCTGATCGGCGGCGAGATGATCAAGGCCGGCACCCTGACCCTGGAGGAGGTGAGGAGGAAGTTCAACAACGGCGAGATCAACTTCGCGGCCGACTGATAA

SEQ ID NO: 17 - protein, 2832 aa, Artificial sequence
  TRAC_T01-R TALEN
ATGGGCGATCCTAAAAAGAAACGTAAGGTCATCGATAAGGAGACCGCCGCTGCCAAGTTCGAGAGACAGCACATGGACAGCATCGATATCGCCGATCTACGCACGCTCGGCTACAGCCAGCAGCAACAGGAGAAGATCAAACCGAAGGTTCGTTCGACAGTGGCGCAGCACCACGAGGCACTGGTCGGCCACGGGTTTACACACGCGCACATCGTTGCGTTAAGCCAACACCCGGCAGCGTTAGGGACCGTCGCTGTCAAGTATCAGGACATGATCGCAGCGTTGCCAGAGGCGACACACGAAGCGATCGTTGGCGTCGGCAAACAGTGGTCCGGCGCACGCGCTCTGGAGGCCTTGCTCACGGTGGCGGGAGAGTTGAGAGGTCCACCGTTACAGTTGGACACAGGCCAACTTCTCAAGATTGCAAAACGTGGCGGCGTGACCGCAGTGGAGGCAGTGCATGCATGGCGCAATGCACTGACGGGTGCCCCGCTCAACTTGACCCCGGAGCAGGTGGTGGCCATCGCCAGCCACGATGGCGGCAAGCAGGCGCTGGAGACGGTCCAGCGGCTGTTGCCGGTGCTGTGCCAGGCCCACGGCTTGACCCCCCAGCAGGTGGTGGCCATCGCCAGCAATGGCGGTGGCAAGCAGGCGCTGGAGACGGTCCAGCGGCTGTTGCCGGTGCTGTGCCAGGCCCACGGCTTGACCCCGGAGCAGGTGGTGGCCATCGCCAGCCACGATGGCGGCAAGCAGGCGCTGGAGACGGTCCAGCGGCTGTTGCCGGTGCTGTGCCAGGCCCACGGCTTGACCCCGGAGCAGGTGGTGGCCATCGCCAGCAATATTGGTGGCAAGCAGGCGCTGGAGACGGTGCAGGCGCTGTTGCCGGTGCTGTGCCAGGCCCACGGCTTGACCCCCCAGCAGGTGGTGGCCATCGCCAGCAATAATGGTGGCAAGCAGGCGCTGGAGACGGTCCAGCGGCTGTTGCCGGTGCTGTGCCAGGCCCACGGCTTGACCCCGGAGCAGGTGGTGGCCATCGCCAGCCACGATGGCGGCAAGCAGGCGCTGGAGACGGTCCAGCGGCTGTTGCCGGTGCTGTGCCAGGCCCACGGCTTGACCCCCCAGCAGGTGGTGGCCATCGCCAGCAATGGCGGTGGCAAGCAGGCGCTGGAGACGGTCCAGCGGCTGTTGCCGGTGCTGTGCCAGGCCCACGGCTTGACCCCCCAGCAGGTGGTGGCCATCGCCAGCAATAATGGTGGCAAGCAGGCGCTGGAGACGGTCCAGCGGCTGTTGCCGGTGCTGTGCCAGGCCCACGGCTTGACCCCCCAGCAGGTGGTGGCCATCGCCAGCAATAATGGTGGCAAGCAGGCGCTGGAGACGGTCCAGCGGCTGTTGCCGGTGCTGTGCCAGGCCCACGGCTTGACCCCCCAGCAGGTGGTGGCCATCGCCAGCAATGGCGGTGGCAAGCAGGCGCTGGAGACGGTCCAGCGGCTGTTGCCGGTGCTGTGCCAGGCCCACGGCTTGACCCCGGAGCAGGTGGTGGCCATCGCCAGCAATATTGGTGGCAAGCAGGCGCTGGAGACGGTGCAGGCGCTGTTGCCGGTGCTGTGCCAGGCCCACGGCTTGACCCCGGAGCAGGTGGTGGCCATCGCCAGCCACGATGGCGGCAAGCAGGCGCTGGAGACGGTCCAGCGGCTGTTGCCGGTGCTGTGCCAGGCCCACGGCTTGACCCCGGAGCAGGTGGTGGCCATCGCCAGCAATATTGGTGGCAAGCAGGCGCTGGAGACGGTGCAGGCGCTGTTGCCGGTGCTGTGCCAGGCCCACGGCTTGACCCCGGAGCAGGTGGTGGCCATCGCCAGCCACGATGGCGGCAAGCAGGCGCTGGAGACGGTCCAGCGGCTGTTGCCGGTGCTGTGCCAGGCCCACGGCTTGACCCCCCAGCAGGTGGTGGCCATCGCCAGCAATAATGGTGGCAAGCAGGCGCTGGAGACGGTCCAGCGGCTGTTGCCGGTGCTGTGCCAGGCCCACGGCTTGACCCCTCAGCAGGTGGTGGCCATCGCCAGCAATGGCGGCGGCAGGCCGGCGCTGGAGAGCATTGTTGCCCAGTTATCTCGCCCTGATCCGGCGTTGGCCGCGTTGACCAACGACCACCTCGTCGCCTTGGCCTGCCTCGGCGGGCGTCCTGCGCTGGATGCAGTGAAAAAGGGATTGGGGGATCCTATCAGCCGTTCCCAGCTGGTGAAGTCCGAGCTGGAGGAGAAGAAATCCGAGTTGAGGCACAAGCTGAAGTACGTGCCCCACGAGTACATCGAGCTGATCGAGATCGCCCGGAACAGCACCCAGGACCGTATCCTGGAGATGAAGGTGATGGAGTTCTTCATGAAGGTGTACGGCTACAGGGGCAAGCACCTGGGCGGCTCCAGGAAGCCCGACGGCGCCATCTACACCGTGGGCTCCCCCATCGACTACGGCGTGATCGTGGACACCAAGGCCTACTCCGGCGGCTACAACCTGCCCATCGGCCAGGCCGACGAAATGCAGAGGTACGTGGAGGAGAACCAGACCAGGAACAAGCACATCAACCCCAACGAGTGGTGGAAGGTGTACCCCTCCAGCGTGACCGAGTTCAAGTTCCTGTTCGTGTCCGGCCACTTCAAGGGCAACTACAAGGCCCAGCTGACCAGGCTGAACCACATCACCAACTGCAACGGCGCCGTGCTGTCCGTGGAGGAGCTCCTGATCGGCGGCGAGATGATCAAGGCCGGCACCCTGACCCTGGAGGAGGTGAGGAGGAAGTTCAACAACGGCGAGATCAACTTCGCGGCCGACTGATAA

SEQ ID NO: 18 - protein, 113 aa, Artificial sequence
  Humanized scFv Klon43 Variant VL1
MADYKDIVMTQSPSSVSASVGDRVTITCRASQNVDSAVAWYQQKPGKAPKALIYSASYRYSGVPSRFSGRGSGTDFTLTISSLQPEDFATYYCQQYYSTPWTFGQGTKVEIKR

SEQ ID NO: 19 - protein, 113 aa, Artificial sequence
  Humanized scFv Klon43 Variant VL2
MADYKDIQMTQSPSSVSASVGDRVTITCRASQNVDSAVAWYQQKPGKAPKALIYSASYRYSGVPSRFSGRGSGTDFTLTISSLQPEDFATYYCQQYYSTPWTFGQGTKVEIKR

SEQ ID NO: 20 - protein, 113 aa, Artificial sequence
  Humanized scFv Klon43 Variant VL3
MADYKDIQMTQSPSSVSASVGDRVTITCRASQNVDSAVAWYQQKPGKAPKALIYSASYRYSGVPSRFSGSGSGTDFTLTISSLQPEDFATYYCQQYYSTPWTFGQGTKVEIKR

SEQ ID NO: 21 - protein, 113 aa, Artificial sequence
  Humanized scFv Klon43 Variant VL4
MADYKDIQMTQSPSSVSASVGDRVTITCRASQNVDSAVAWYQQKPGKAPKLLIYSASYRYSGVPSRFSGSGSGTDFTLTISSLQPEDFATYYCQQYYSTPWTFGQGTKVEIKR

SEQ ID NO: 22 - protein, 113 aa, Artificial sequence
  Humanized scFv Klon43 Variant VL5
MADYKDIQMTQSPSSVSASVGDRVTITCRASQNVDSAVAWYQQKPGKAPKLLIYSASYRQSGVPSRFSGSGSGTDFTLTISSLQPEDFATYYCQQYYSTPWTFGQGTKVEIKR

SEQ ID NO: 23 - protein, 113 aa, Artificial sequence
  Humanized scFv Klon43 Variant VL6
MADYKDIQMTQSPSSVSASVGDRVTITCRASQNVDSAVAWYQQKPGKAPKLLIYSASYGQSGVPSRFSGSGSGTDFTLTISSLQPEDFATYYCQQYYSTPWTFGQGTKVEIKR

SEQ ID NO: 24 - protein, 127 aa, Artificial sequence
  Humanized scFv Klon43 variant VH1
EVKLVESGGGLVQPGRSLRLSCTASGFTFTDYYMSWVRQAPGKGLEWVGLIRSKADGYTTEYSASVKGRFTISRDDSKSILYLQMNSLKTEDTAVYYCARDAAYYSYYSPEGAMDYWGQGTLVTVSS

SEQ ID NO: 25 - protein, 127 aa, Artificial sequence
  Humanized scFv Klon43 variant VH2
EVQLVESGGGLVQPGRSLRLSCTASGFTFTDYYMSWVRQAPGKGLEWVGLIRSKADGYTTEYSASVKGRFTISRDDSKSILYLQMNSLKTEDTAVYYCARDAAYYSYYSPEGAMDYWGQGTLVTVSS

SEQ ID NO: 26 - protein, 127 aa, Artificial sequence
  Humanized scFv Klon43 variant VH3
EVQLVESGGGLVQPGRSLRLSCTASGFTFTDYYMSWVRQAPGKGLEWVGLIRSKADGYTTEYSASVKGRFTISRDDSKSIAYLQMNSLKTEDTAVYYCARDAAYYSYYSPEGAMDYWGQGTLVTVSS

SEQ ID NO: 27 - protein, 127 aa, Artificial sequence
  Humanized scFv Klon43 variant VH4
EVQLVESGGGLVQPGRSLRLSCTASGFTFTDYYMSWVRQAPGKGLEWVGFIRSKADGYTTEYSASVKGRFTISRDDSKSIAYLQMNSLKTEDTAVYYCARDAAYYSYYSPEGAMDYWGQGTLVTVSS

SEQ ID NO: 28 - protein, 127 aa, Artificial sequence
  Humanized scFv Klon43 variant VH5
EVQLVESGGGLVQPGRSLRLSCTASGFTFTDYYMSWVRQAPGKGLEWVGFIRSKADGYTTEYAASVKGRFTISRDDSKSIAYLQMNSLKTEDTAVYYCARDAAYYSYYSPEGAMDYWGQGTLVTVSS

SEQ ID NO: 29 - protein, 127 aa, Artificial sequence
  Humanized scFv Klon43 variant VH6
EVQLVESGGGLVQPGRSLRLSCTASGFTFTDYYMSWVRQAPGKGLEWVGLIRSKADGYTTEYAASVKGRFTISRDDSKSIAYLQMNSLKTEDTAVYYCARDAAYYSYYSPEGAMDYWGQGTLVTVSS

SEQ ID NO: 30 - protein, 127 aa, Artificial sequence
  Humanized scFv Klon43 variant VH7
EVQLVESGGGLVQPGRSLRLSCTASGFTFTDYYMSWVRQAPGKGLEWVGFIRSKADGYTTEYAASVKGRFTISRDDSKSIAYLQMNSLKTEDTAVYYCTRDAAYYSYYSPEGAMDYWGQGTLVTVSS

SEQ ID NO: 31 - protein, 470 aa, Artificial sequence
  Klo43-1+SP
MALPVTALLLPLALLLHAARPEVKLVESGGGLVQPGGSLSLSCAASGFTFTDYYMSWVRQPPGKALEWLALIRSKADGYTTEYSASVKGRFTLSRDDSQSILYLQMNALRPEDSATYYCARDAAYYSYYSPEGAMDYWGQGTSVTVSSGGGGSGGGGSGGGGSMADYKDIVMTQSHKFMSTSVGDRVNITCKASQNVDSAVAWYQQKPGQSPKALIYSASYRYSGVPDRFTGRGSGTDFTLTISSVQAEDLAVYYCQQYYSTPWTFGGGTKLEIKRGLAVSTISSFFPPGYQIYIWAPLAGTCGVLLLSLVITLYCKRGRKKLLYIFKQPFMRPVQTTQEEDGCSCRFPEEEEGGCELRVKFSRSADAPAYQQGQNQLYNELNLGRREEYDVLDKRRGRDPEMGGKPRRKNPQEGLYNELQKDKMAEAYSEIGMKGERRRGKGHDGLYQGLSTATKDTYDALHMQALPPR

SEQ ID NO: 32 - protein, 499 aa, Artificial sequence
  Klo43-3+SP
MALPVTALLLPLALLLHAARPEVKLVESGGGLVQPGGSLSLSCAASGFTFTDYYMSWVRQPPGKALEWLALIRSKADGYTTEYSASVKGRFTLSRDDSQSILYLQMNALRPEDSATYYCARDAAYYSYYSPEGAMDYWGQGTSVTVSSGGGGSGGGGSGGGGSMADYKDIVMTQSHKFMSTSVGDRVNITCKASQNVDSAVAWYQQKPGQSPKALIYSASYRYSGVPDRFTGRGSGTDFTLTISSVQAEDLAVYYCQQYYSTPWTFGGGTKLEIKRTTTPAPRPPTPAPTIASQPLSLRPEACRPAAGGAVHTRGLDFACDIYIWAPLAGTCGVLLLSLVITLYCKRGRKKLLYIFKQPFMRPVQTTQEEDGCSCRFPEEEEGGCELRVKFSRSADAPAYQQGQNQLYNELNLGRREEYDVLDKRRGRDPEMGGKPRRKNPQEGLYNELQKDKMAEAYSEIGMKGERRRGKGHDGLYQGLSTATKDTYDALHMQALPPR

SEQ ID NO: 33 - protein, 685 aa, Artificial sequence
  Klo43-5+SP
MALPVTALLLPLALLLHAARPEVKLVESGGGLVQPGGSLSLSCAASGFTFTDYYMSWVRQPPGKALEWLALIRSKADGYTTEYSASVKGRFTLSRDDSQSILYLQMNALRPEDSATYYCARDAAYYSYYSPEGAMDYWGQGTSVTVSSGGGGSGGGGSGGGGSMADYKDIVMTQSHKFMSTSVGDRVNITCKASQNVDSAVAWYQQKPGQSPKALIYSASYRYSGVPDRFTGRGSGTDFTLTISSVQAEDLAVYYCQQYYSTPWTFGGGTKLEIKREPKSPDKTHTCPPCPAPPVAGPSVFLFPPKPKDTLMIARTPEVTCVVVDVSHEDPEVKFNWYVDGVEVHNAKTKPREEQYNSTYRVVSVLTVLHQDWLNGKEYKCKVSNKALPAPIEKTISKAKGQPREPQVYTLPPSRDELTKNQVSLTCLVKGFYPSDIAVEWESNGQPENNYKTTPPVLDSDGSFFLYSKLTVDKSRWQQGNVFSCSVMHEALHNHYTQKSLSLSPGKIYIWAPLAGTCGVLLLSLVITLYCKRGRKKLLYIFKQPFMRPVQTTQEEDGCSCRFPEEEEGGCELRVKFSRSADAPAYQQGQNQLYNELNLGRREEYDVLDKRRGRDPEMGGKPRRKNPQEGLYNELQKDKMAEAYSEIGMKGERRRGKGHDGLYQGLSTATKDTYDALHMQALPPR

SEQ ID NO: 34 - protein, 470 aa, Artificial sequence
  hKlo43-1 VH1/VL1
MALPVTALLLPLALLLHAARPEVKLVESGGGLVQPGRSLRLSCTASGFTFTDYYMSWVRQAPGKGLEWVGLIRSKADGYTTEYSASVKGRFTISRDDSKSILYLQMNSLKTEDTAVYYCARDAAYYSYYSPEGAMDYWGQGTLVTVSSGGGGSGGGGSGGGGSMADYKDIVMTQSPSSVSASVGDRVTITCRASQNVDSAVAWYQQKPGKAPKALIYSASYRYSGVPSRFSGRGSGTDFTLTISSLQPEDFATYYCQQYYSTPWTFGQGTKVEIKRGLAVSTISSFFPPGYQIYIWAPLAGTCGVLLLSLVITLYCKRGRKKLLYIFKQPFMRPVQTTQEEDGCSCRFPEEEEGGCELRVKFSRSADAPAYQQGQNQLYNELNLGRREEYDVLDKRRGRDPEMGGKPRRKNPQEGLYNELQKDKMAEAYSEIGMKGERRRGKGHDGLYQGLSTATKDTYDALHMQALPPR

SEQ ID NO: 35 - protein, 470 aa, Artificial sequence
  hKlo43-1 VH1/VL2
MALPVTALLLPLALLLHAARPEVKLVESGGGLVQPGRSLRLSCTASGFTFTDYYMSWVRQAPGKGLEWVGLIRSKADGYTTEYSASVKGRFTISRDDSKSILYLQMNSLKTEDTAVYYCARDAAYYSYYSPEGAMDYWGQGTLVTVSSGGGGSGGGGSGGGGSMADYKDIQMTQSPSSVSASVGDRVTITCRASQNVDSAVAWYQQKPGKAPKALIYSASYRYSGVPSRFSGRGSGTDFTLTISSLQPEDFATYYCQQYYSTPWTFGQGTKVEIKRGLAVSTISSFFPPGYQIYIWAPLAGTCGVLLLSLVITLYCKRGRKKLLYIFKQPFMRPVQTTQEEDGCSCRFPEEEEGGCELRVKFSRSADAPAYQQGQNQLYNELNLGRREEYDVLDKRRGRDPEMGGKPRRKNPQEGLYNELQKDKMAEAYSEIGMKGERRRGKGHDGLYQGLSTATKDTYDALHMQALPPR

SEQ ID NO: 36 - protein, 470 aa, Artificial sequence
  hKlo43-1 VH1/VL3
MALPVTALLLPLALLLHAARPEVKLVESGGGLVQPGRSLRLSCTASGFTFTDYYMSWVRQAPGKGLEWVGLIRSKADGYTTEYSASVKGRFTISRDDSKSILYLQMNSLKTEDTAVYYCARDAAYYSYYSPEGAMDYWGQGTLVTVSSGGGGSGGGGSGGGGSMADYKDIQMTQSPSSVSASVGDRVTITCRASQNVDSAVAWYQQKPGKAPKALIYSASYRYSGVPSRFSGSGSGTDFTLTISSLQPEDFATYYCQQYYSTPWTFGQGTKVEIKRGLAVSTISSFFPPGYQIYIWAPLAGTCGVLLLSLVITLYCKRGRKKLLYIFKQPFMRPVQTTQEEDGCSCRFPEEEEGGCELRVKFSRSADAPAYQQGQNQLYNELNLGRREEYDVLDKRRGRDPEMGGKPRRKNPQEGLYNELQKDKMAEAYSEIGMKGERRRGKGHDGLYQGLSTATKDTYDALHMQALPPR

SEQ ID NO: 37 - protein, 470 aa, Artificial sequence
  hKlo43-1 VH1/VL4
MALPVTALLLPLALLLHAARPEVKLVESGGGLVQPGRSLRLSCTASGFTFTDYYMSWVRQAPGKGLEWVGLIRSKADGYTTEYSASVKGRFTISRDDSKSILYLQMNSLKTEDTAVYYCARDAAYYSYYSPEGAMDYWGQGTLVTVSSGGGGSGGGGSGGGGSMADYKDIQMTQSPSSVSASVGDRVTITCRASQNVDSAVAWYQQKPGKAPKLLIYSASYRYSGVPSRFSGSGSGTDFTLTISSLQPEDFATYYCQQYYSTPWTFGQGTKVEIKRGLAVSTISSFFPPGYQIYIWAPLAGTCGVLLLSLVITLYCKRGRKKLLYIFKQPFMRPVQTTQEEDGCSCRFPEEEEGGCELRVKFSRSADAPAYQQGQNQLYNELNLGRREEYDVLDKRRGRDPEMGGKPRRKNPQEGLYNELQKDKMAEAYSEIGMKGERRRGKGHDGLYQGLSTATKDTYDALHMQALPPR

SEQ ID NO: 38 - protein, 470 aa, Artificial sequence
  VH1/VL5
MALPVTALLLPLALLLHAARPEVKLVESGGGLVQPGRSLRLSCTASGFTFTDYYMSWVRQAPGKGLEWVGLIRSKADGYTTEYSASVKGRFTISRDDSKSILYLQMNSLKTEDTAVYYCARDAAYYSYYSPEGAMDYWGQGTLVTVSSGGGGSGGGGSGGGGSMADYKDIQMTQSPSSVSASVGDRVTITCRASQNVDSAVAWYQQKPGKAPKLLIYSASYRQSGVPSRFSGSGSGTDFTLTISSLQPEDFATYYCQQYYSTPWTFGQGTKVEIKRGLAVSTISSFFPPGYQIYIWAPLAGTCGVLLLSLVITLYCKRGRKKLLYIFKQPFMRPVQTTQEEDGCSCRFPEEEEGGCELRVKFSRSADAPAYQQGQNQLYNELNLGRREEYDVLDKRRGRDPEMGGKPRRKNPQEGLYNELQKDKMAEAYSEIGMKGERRRGKGHDGLYQGLSTATKDTYDALHMQALPPR

SEQ ID NO: 39 - protein, 470 aa, Artificial sequence
  VH1/VL6
MALPVTALLLPLALLLHAARPEVKLVESGGGLVQPGRSLRLSCTASGFTFTDYYMSWVRQAPGKGLEWVGLIRSKADGYTTEYSASVKGRFTISRDDSKSILYLQMNSLKTEDTAVYYCARDAAYYSYYSPEGAMDYWGQGTLVTVSSGGGGSGGGGSGGGGSMADYKDIQMTQSPSSVSASVGDRVTITCRASQNVDSAVAWYQQKPGKAPKLLIYSASYGQSGVPSRFSGSGSGTDFTLTISSLQPEDFATYYCQQYYSTPWTFGQGTKVEIKRGLAVSTISSFFPPGYQIYIWAPLAGTCGVLLLSLVITLYCKRGRKKLLYIFKQPFMRPVQTTQEEDGCSCRFPEEEEGGCELRVKFSRSADAPAYQQGQNQLYNELNLGRREEYDVLDKRRGRDPEMGGKPRRKNPQEGLYNELQKDKMAEAYSEIGMKGERRRGKGHDGLYQGLSTATKDTYDALHMQALPPR

SEQ ID NO: 40 - protein, 470 aa, Artificial sequence
  VH2/VL1
MALPVTALLLPLALLLHAARPEVQLVESGGGLVQPGRSLRLSCTASGFTFTDYYMSWVRQAPGKGLEWVGLIRSKADGYTTEYSASVKGRFTISRDDSKSILYLQMNSLKTEDTAVYYCARDAAYYSYYSPEGAMDYWGQGTLVTVSSGGGGSGGGGSGGGGSMADYKDIVMTQSPSSVSASVGDRVTITCRASQNVDSAVAWYQQKPGKAPKALIYSASYRYSGVPSRFSGRGSGTDFTLTISSLQPEDFATYYCQQYYSTPWTFGQGTKVEIKRGLAVSTISSFFPPGYQIYIWAPLAGTCGVLLLSLVITLYCKRGRKKLLYIFKQPFMRPVQTTQEEDGCSCRFPEEEEGGCELRVKFSRSADAPAYQQGQNQLYNELNLGRREEYDVLDKRRGRDPEMGGKPRRKNPQEGLYNELQKDKMAEAYSEIGMKGERRRGKGHDGLYQGLSTATKDTYDALHMQALPPR

SEQ ID NO: 41 - protein, 470 aa, Artificial sequence
  VH2/VL2
MALPVTALLLPLALLLHAARPEVQLVESGGGLVQPGRSLRLSCTASGFTFTDYYMSWVRQAPGKGLEWVGLIRSKADGYTTEYSASVKGRFTISRDDSKSILYLQMNSLKTEDTAVYYCARDAAYYSYYSPEGAMDYWGQGTLVTVSSGGGGSGGGGSGGGGSMADYKDIQMTQSPSSVSASVGDRVTITCRASQNVDSAVAWYQQKPGKAPKALIYSASYRYSGVPSRFSGRGSGTDFTLTISSLQPEDFATYYCQQYYSTPWTFGQGTKVEIKRGLAVSTISSFFPPGYQIYIWAPLAGTCGVLLLSLVITLYCKRGRKKLLYIFKQPFMRPVQTTQEEDGCSCRFPEEEEGGCELRVKFSRSADAPAYQQGQNQLYNELNLGRREEYDVLDKRRGRDPEMGGKPRRKNPQEGLYNELQKDKMAEAYSEIGMKGERRRGKGHDGLYQGLSTATKDTYDALHMQALPPR

SEQ ID NO: 42 - protein, 470 aa, Artificial sequence
  VH2/VL3
MALPVTALLLPLALLLHAARPEVQLVESGGGLVQPGRSLRLSCTASGFTFTDYYMSWVRQAPGKGLEWVGLIRSKADGYTTEYSASVKGRFTISRDDSKSILYLQMNSLKTEDTAVYYCARDAAYYSYYSPEGAMDYWGQGTLVTVSSGGGGSGGGGSGGGGSMADYKDIQMTQSPSSVSASVGDRVTITCRASQNVDSAVAWYQQKPGKAPKALIYSASYRYSGVPSRFSGSGSGTDFTLTISSLQPEDFATYYCQQYYSTPWTFGQGTKVEIKRGLAVSTISSFFPPGYQIYIWAPLAGTCGVLLLSLVITLYCKRGRKKLLYIFKQPFMRPVQTTQEEDGCSCRFPEEEEGGCELRVKFSRSADAPAYQQGQNQLYNELNLGRREEYDVLDKRRGRDPEMGGKPRRKNPQEGLYNELQKDKMAEAYSEIGMKGERRRGKGHDGLYQGLSTATKDTYDALHMQALPPR

SEQ ID NO: 43 - protein, 470 aa, Artificial sequence
  VH2/VL4
MALPVTALLLPLALLLHAARPEVQLVESGGGLVQPGRSLRLSCTASGFTFTDYYMSWVRQAPGKGLEWVGLIRSKADGYTTEYSASVKGRFTISRDDSKSILYLQMNSLKTEDTAVYYCARDAAYYSYYSPEGAMDYWGQGTLVTVSSGGGGSGGGGSGGGGSMADYKDIQMTQSPSSVSASVGDRVTITCRASQNVDSAVAWYQQKPGKAPKLLIYSASYRYSGVPSRFSGSGSGTDFTLTISSLQPEDFATYYCQQYYSTPWTFGQGTKVEIKRGLAVSTISSFFPPGYQIYIWAPLAGTCGVLLLSLVITLYCKRGRKKLLYIFKQPFMRPVQTTQEEDGCSCRFPEEEEGGCELRVKFSRSADAPAYQQGQNQLYNELNLGRREEYDVLDKRRGRDPEMGGKPRRKNPQEGLYNELQKDKMAEAYSEIGMKGERRRGKGHDGLYQGLSTATKDTYDALHMQALPPR

SEQ ID NO: 44 - protein, 470 aa, Artificial sequence
  VH2/VL5
MALPVTALLLPLALLLHAARPEVQLVESGGGLVQPGRSLRLSCTASGFTFTDYYMSWVRQAPGKGLEWVGLIRSKADGYTTEYSASVKGRFTISRDDSKSILYLQMNSLKTEDTAVYYCARDAAYYSYYSPEGAMDYWGQGTLVTVSSGGGGSGGGGSGGGGSMADYKDIQMTQSPSSVSASVGDRVTITCRASQNVDSAVAWYQQKPGKAPKLLIYSASYRQSGVPSRFSGSGSGTDFTLTISSLQPEDFATYYCQQYYSTPWTFGQGTKVEIKRGLAVSTISSFFPPGYQIYIWAPLAGTCGVLLLSLVITLYCKRGRKKLLYIFKQPFMRPVQTTQEEDGCSCRFPEEEEGGCELRVKFSRSADAPAYQQGQNQLYNELNLGRREEYDVLDKRRGRDPEMGGKPRRKNPQEGLYNELQKDKMAEAYSEIGMKGERRRGKGHDGLYQGLSTATKDTYDALHMQALPPR

SEQ ID NO: 45 - protein, 470 aa, Artificial sequence
  VH2/VL7
MALPVTALLLPLALLLHAARPEVQLVESGGGLVQPGRSLRLSCTASGFTFTDYYMSWVRQAPGKGLEWVGLIRSKADGYTTEYSASVKGRFTISRDDSKSILYLQMNSLKTEDTAVYYCARDAAYYSYYSPEGAMDYWGQGTLVTVSSGGGGSGGGGSGGGGSMADYKDIQMTQSPSSVSASVGDRVTITCRASQNVDSAVAWYQQKPGKAPKLLIYSASYGQSGVPSRFSGSGSGTDFTLTISSLQPEDFATYYCQQYYSTPWTFGQGTKVEIKRGLAVSTISSFFPPGYQIYIWAPLAGTCGVLLLSLVITLYCKRGRKKLLYIFKQPFMRPVQTTQEEDGCSCRFPEEEEGGCELRVKFSRSADAPAYQQGQNQLYNELNLGRREEYDVLDKRRGRDPEMGGKPRRKNPQEGLYNELQKDKMAEAYSEIGMKGERRRGKGHDGLYQGLSTATKDTYDALHMQALPPR

SEQ ID NO: 46 - protein, 470 aa, Artificial sequence
  VH3/VL1
MALPVTALLLPLALLLHAARPEVQLVESGGGLVQPGRSLRLSCTASGFTFTDYYMSWVRQAPGKGLEWVGLIRSKADGYTTEYSASVKGRFTISRDDSKSIAYLQMNSLKTEDTAVYYCARDAAYYSYYSPEGAMDYWGQGTLVTVSSGGGGSGGGGSGGGGSMADYKDIVMTQSPSSVSASVGDRVTITCRASQNVDSAVAWYQQKPGKAPKALIYSASYRYSGVPSRFSGRGSGTDFTLTISSLQPEDFATYYCQQYYSTPWTFGQGTKVEIKRGLAVSTISSFFPPGYQIYIWAPLAGTCGVLLLSLVITLYCKRGRKKLLYIFKQPFMRPVQTTQEEDGCSCRFPEEEEGGCELRVKFSRSADAPAYQQGQNQLYNELNLGRREEYDVLDKRRGRDPEMGGKPRRKNPQEGLYNELQKDKMAEAYSEIGMKGERRRGKGHDGLYQGLSTATKDTYDALHMQALPPR

SEQ ID NO: 47 - protein, 470 aa, Artificial sequence
  VH3/VL2
MALPVTALLLPLALLLHAARPEVQLVESGGGLVQPGRSLRLSCTASGFTFTDYYMSWVRQAPGKGLEWVGLIRSKADGYTTEYSASVKGRFTISRDDSKSIAYLQMNSLKTEDTAVYYCARDAAYYSYYSPEGAMDYWGQGTLVTVSSGGGGSGGGGSGGGGSMADYKDIQMTQSPSSVSASVGDRVTITCRASQNVDSAVAWYQQKPGKAPKALIYSASYRYSGVPSRFSGRGSGTDFTLTISSLQPEDFATYYCQQYYSTPWTFGQGTKVEIKRGLAVSTISSFFPPGYQIYIWAPLAGTCGVLLLSLVITLYCKRGRKKLLYIFKQPFMRPVQTTQEEDGCSCRFPEEEEGGCELRVKFSRSADAPAYQQGQNQLYNELNLGRREEYDVLDKRRGRDPEMGGKPRRKNPQEGLYNELQKDKMAEAYSEIGMKGERRRGKGHDGLYQGLSTATKDTYDALHMQALPPR

SEQ ID NO: 48 - protein, 470 aa, Artificial sequence
  VH3/VL3
MALPVTALLLPLALLLHAARPEVQLVESGGGLVQPGRSLRLSCTASGFTFTDYYMSWVRQAPGKGLEWVGLIRSKADGYTTEYSASVKGRFTISRDDSKSIAYLQMNSLKTEDTAVYYCARDAAYYSYYSPEGAMDYWGQGTLVTVSSGGGGSGGGGSGGGGSMADYKDIQMTQSPSSVSASVGDRVTITCRASQNVDSAVAWYQQKPGKAPKALIYSASYRYSGVPSRFSGSGSGTDFTLTISSLQPEDFATYYCQQYYSTPWTFGQGTKVEIKRGLAVSTISSFFPPGYQIYIWAPLAGTCGVLLLSLVITLYCKRGRKKLLYIFKQPFMRPVQTTQEEDGCSCRFPEEEEGGCELRVKFSRSADAPAYQQGQNQLYNELNLGRREEYDVLDKRRGRDPEMGGKPRRKNPQEGLYNELQKDKMAEAYSEIGMKGERRRGKGHDGLYQGLSTATKDTYDALHMQALPPR

SEQ ID NO: 49 - protein, 470 aa, Artificial sequence
  VH3/VL4
MALPVTALLLPLALLLHAARPEVQLVESGGGLVQPGRSLRLSCTASGFTFTDYYMSWVRQAPGKGLEWVGLIRSKADGYTTEYSASVKGRFTISRDDSKSIAYLQMNSLKTEDTAVYYCARDAAYYSYYSPEGAMDYWGQGTLVTVSSGGGGSGGGGSGGGGSMADYKDIQMTQSPSSVSASVGDRVTITCRASQNVDSAVAWYQQKPGKAPKLLIYSASYRYSGVPSRFSGSGSGTDFTLTISSLQPEDFATYYCQQYYSTPWTFGQGTKVEIKRGLAVSTISSFFPPGYQIYIWAPLAGTCGVLLLSLVITLYCKRGRKKLLYIFKQPFMRPVQTTQEEDGCSCRFPEEEEGGCELRVKFSRSADAPAYQQGQNQLYNELNLGRREEYDVLDKRRGRDPEMGGKPRRKNPQEGLYNELQKDKMAEAYSEIGMKGERRRGKGHDGLYQGLSTATKDTYDALHMQALPPR

SEQ ID NO: 50 - protein, 470 aa, Artificial sequence
  VH3/VL5
MALPVTALLLPLALLLHAARPEVQLVESGGGLVQPGRSLRLSCTASGFTFTDYYMSWVRQAPGKGLEWVGLIRSKADGYTTEYSASVKGRFTISRDDSKSIAYLQMNSLKTEDTAVYYCARDAAYYSYYSPEGAMDYWGQGTLVTVSSGGGGSGGGGSGGGGSMADYKDIQMTQSPSSVSASVGDRVTITCRASQNVDSAVAWYQQKPGKAPKLLIYSASYRQSGVPSRFSGSGSGTDFTLTISSLQPEDFATYYCQQYYSTPWTFGQGTKVEIKRGLAVSTISSFFPPGYQIYIWAPLAGTCGVLLLSLVITLYCKRGRKKLLYIFKQPFMRPVQTTQEEDGCSCRFPEEEEGGCELRVKFSRSADAPAYQQGQNQLYNELNLGRREEYDVLDKRRGRDPEMGGKPRRKNPQEGLYNELQKDKMAEAYSEIGMKGERRRGKGHDGLYQGLSTATKDTYDALHMQALPPR

SEQ ID NO: 51 - protein, 470 aa, Artificial sequence
  VH3/VL6
MALPVTALLLPLALLLHAARPEVQLVESGGGLVQPGRSLRLSCTASGFTFTDYYMSWVRQAPGKGLEWVGLIRSKADGYTTEYSASVKGRFTISRDDSKSIAYLQMNSLKTEDTAVYYCARDAAYYSYYSPEGAMDYWGQGTLVTVSSGGGGSGGGGSGGGGSMADYKDIQMTQSPSSVSASVGDRVTITCRASQNVDSAVAWYQQKPGKAPKLLIYSASYGQSGVPSRFSGSGSGTDFTLTISSLQPEDFATYYCQQYYSTPWTFGQGTKVEIKRGLAVSTISSFFPPGYQIYIWAPLAGTCGVLLLSLVITLYCKRGRKKLLYIFKQPFMRPVQTTQEEDGCSCRFPEEEEGGCELRVKFSRSADAPAYQQGQNQLYNELNLGRREEYDVLDKRRGRDPEMGGKPRRKNPQEGLYNELQKDKMAEAYSEIGMKGERRRGKGHDGLYQGLSTATKDTYDALHMQALPPR

SEQ ID NO: 52 - protein, 470 aa, Artificial sequence
  VH4/VL1
MALPVTALLLPLALLLHAARPEVQLVESGGGLVQPGRSLRLSCTASGFTFTDYYMSWVRQAPGKGLEWVGFIRSKADGYTTEYSASVKGRFTISRDDSKSIAYLQMNSLKTEDTAVYYCARDAAYYSYYSPEGAMDYWGQGTLVTVSSGGGGSGGGGSGGGGSMADYKDIVMTQSPSSVSASVGDRVTITCRASQNVDSAVAWYQQKPGKAPKALIYSASYRYSGVPSRFSGRGSGTDFTLTISSLQPEDFATYYCQQYYSTPWTFGQGTKVEIKRGLAVSTISSFFPPGYQIYIWAPLAGTCGVLLLSLVITLYCKRGRKKLLYIFKQPFMRPVQTTQEEDGCSCRFPEEEEGGCELRVKFSRSADAPAYQQGQNQLYNELNLGRREEYDVLDKRRGRDPEMGGKPRRKNPQEGLYNELQKDKMAEAYSEIGMKGERRRGKGHDGLYQGLSTATKDTYDALHMQALPPR

SEQ ID NO: 53 - protein, 470 aa, Artificial sequence
  VH4/VL2
MALPVTALLLPLALLLHAARPEVQLVESGGGLVQPGRSLRLSCTASGFTFTDYYMSWVRQAPGKGLEWVGFIRSKADGYTTEYSASVKGRFTISRDDSKSIAYLQMNSLKTEDTAVYYCARDAAYYSYYSPEGAMDYWGQGTLVTVSSGGGGSGGGGSGGGGSMADYKDIQMTQSPSSVSASVGDRVTITCRASQNVDSAVAWYQQKPGKAPKALIYSASYRYSGVPSRFSGRGSGTDFTLTISSLQPEDFATYYCQQYYSTPWTFGQGTKVEIKRGLAVSTISSFFPPGYQIYIWAPLAGTCGVLLLSLVITLYCKRGRKKLLYIFKQPFMRPVQTTQEEDGCSCRFPEEEEGGCELRVKFSRSADAPAYQQGQNQLYNELNLGRREEYDVLDKRRGRDPEMGGKPRRKNPQEGLYNELQKDKMAEAYSEIGMKGERRRGKGHDGLYQGLSTATKDTYDALHMQALPPR

SEQ ID NO: 54 - protein, 470 aa, Artificial sequence
  VH4/VL3
MALPVTALLLPLALLLHAARPEVQLVESGGGLVQPGRSLRLSCTASGFTFTDYYMSWVRQAPGKGLEWVGFIRSKADGYTTEYSASVKGRFTISRDDSKSIAYLQMNSLKTEDTAVYYCARDAAYYSYYSPEGAMDYWGQGTLVTVSSGGGGSGGGGSGGGGSMADYKDIQMTQSPSSVSASVGDRVTITCRASQNVDSAVAWYQQKPGKAPKALIYSASYRYSGVPSRFSGSGSGTDFTLTISSLQPEDFATYYCQQYYSTPWTFGQGTKVEIKRGLAVSTISSFFPPGYQIYIWAPLAGTCGVLLLSLVITLYCKRGRKKLLYIFKQPFMRPVQTTQEEDGCSCRFPEEEEGGCELRVKFSRSADAPAYQQGQNQLYNELNLGRREEYDVLDKRRGRDPEMGGKPRRKNPQEGLYNELQKDKMAEAYSEIGMKGERRRGKGHDGLYQGLSTATKDTYDALHMQALPPR

SEQ ID NO: 55 - protein, 470 aa, Artificial sequence
  VH4/VL4
MALPVTALLLPLALLLHAARPEVQLVESGGGLVQPGRSLRLSCTASGFTFTDYYMSWVRQAPGKGLEWVGFIRSKADGYTTEYSASVKGRFTISRDDSKSIAYLQMNSLKTEDTAVYYCARDAAYYSYYSPEGAMDYWGQGTLVTVSSGGGGSGGGGSGGGGSMADYKDIQMTQSPSSVSASVGDRVTITCRASQNVDSAVAWYQQKPGKAPKLLIYSASYRYSGVPSRFSGSGSGTDFTLTISSLQPEDFATYYCQQYYSTPWTFGQGTKVEIKRGLAVSTISSFFPPGYQIYIWAPLAGTCGVLLLSLVITLYCKRGRKKLLYIFKQPFMRPVQTTQEEDGCSCRFPEEEEGGCELRVKFSRSADAPAYQQGQNQLYNELNLGRREEYDVLDKRRGRDPEMGGKPRRKNPQEGLYNELQKDKMAEAYSEIGMKGERRRGKGHDGLYQGLSTATKDTYDALHMQALPPR

SEQ ID NO: 56 - protein, 470 aa, Artificial sequence
  VH4/VL5
MALPVTALLLPLALLLHAARPEVQLVESGGGLVQPGRSLRLSCTASGFTFTDYYMSWVRQAPGKGLEWVGFIRSKADGYTTEYSASVKGRFTISRDDSKSIAYLQMNSLKTEDTAVYYCARDAAYYSYYSPEGAMDYWGQGTLVTVSSGGGGSGGGGSGGGGSMADYKDIQMTQSPSSVSASVGDRVTITCRASQNVDSAVAWYQQKPGKAPKLLIYSASYRQSGVPSRFSGSGSGTDFTLTISSLQPEDFATYYCQQYYSTPWTFGQGTKVEIKRGLAVSTISSFFPPGYQIYIWAPLAGTCGVLLLSLVITLYCKRGRKKLLYIFKQPFMRPVQTTQEEDGCSCRFPEEEEGGCELRVKFSRSADAPAYQQGQNQLYNELNLGRREEYDVLDKRRGRDPEMGGKPRRKNPQEGLYNELQKDKMAEAYSEIGMKGERRRGKGHDGLYQGLSTATKDTYDALHMQALPPR

SEQ ID NO: 57 - protein, 470 aa, Artificial sequence
  VH4/VL6
MALPVTALLLPLALLLHAARPEVQLVESGGGLVQPGRSLRLSCTASGFTFTDYYMSWVRQAPGKGLEWVGFIRSKADGYTTEYSASVKGRFTISRDDSKSIAYLQMNSLKTEDTAVYYCARDAAYYSYYSPEGAMDYWGQGTLVTVSSGGGGSGGGGSGGGGSMADYKDIQMTQSPSSVSASVGDRVTITCRASQNVDSAVAWYQQKPGKAPKLLIYSASYGQSGVPSRFSGSGSGTDFTLTISSLQPEDFATYYCQQYYSTPWTFGQGTKVEIKRGLAVSTISSFFPPGYQIYIWAPLAGTCGVLLLSLVITLYCKRGRKKLLYIFKQPFMRPVQTTQEEDGCSCRFPEEEEGGCELRVKFSRSADAPAYQQGQNQLYNELNLGRREEYDVLDKRRGRDPEMGGKPRRKNPQEGLYNELQKDKMAEAYSEIGMKGERRRGKGHDGLYQGLSTATKDTYDALHMQALPPR

SEQ ID NO: 58 - protein, 470 aa, Artificial sequence
  VH5/VL1
MALPVTALLLPLALLLHAARPEVQLVESGGGLVQPGRSLRLSCTASGFTFTDYYMSWVRQAPGKGLEWVGFIRSKADGYTTEYAASVKGRFTISRDDSKSIAYLQMNSLKTEDTAVYYCARDAAYYSYYSPEGAMDYWGQGTLVTVSSGGGGSGGGGSGGGGSMADYKDIVMTQSPSSVSASVGDRVTITCRASQNVDSAVAWYQQKPGKAPKALIYSASYRYSGVPSRFSGRGSGTDFTLTISSLQPEDFATYYCQQYYSTPWTFGQGTKVEIKRGLAVSTISSFFPPGYQIYIWAPLAGTCGVLLLSLVITLYCKRGRKKLLYIFKQPFMRPVQTTQEEDGCSCRFPEEEEGGCELRVKFSRSADAPAYQQGQNQLYNELNLGRREEYDVLDKRRGRDPEMGGKPRRKNPQEGLYNELQKDKMAEAYSEIGMKGERRRGKGHDGLYQGLSTATKDTYDALHMQALPPR

SEQ ID NO: 59 - protein, 470 aa, Artificial sequence
  VH5/VL2
MALPVTALLLPLALLLHAARPEVQLVESGGGLVQPGRSLRLSCTASGFTFTDYYMSWVRQAPGKGLEWVGFIRSKADGYTTEYAASVKGRFTISRDDSKSIAYLQMNSLKTEDTAVYYCARDAAYYSYYSPEGAMDYWGQGTLVTVSSGGGGSGGGGSGGGGSMADYKDIQMTQSPSSVSASVGDRVTITCRASQNVDSAVAWYQQKPGKAPKALIYSASYRYSGVPSRFSGRGSGTDFTLTISSLQPEDFATYYCQQYYSTPWTFGQGTKVEIKRGLAVSTISSFFPPGYQIYIWAPLAGTCGVLLLSLVITLYCKRGRKKLLYIFKQPFMRPVQTTQEEDGCSCRFPEEEEGGCELRVKFSRSADAPAYQQGQNQLYNELNLGRREEYDVLDKRRGRDPEMGGKPRRKNPQEGLYNELQKDKMAEAYSEIGMKGERRRGKGHDGLYQGLSTATKDTYDALHMQALPPR

SEQ ID NO: 60 - protein, 470 aa, Artificial sequence
  VH5/VL3
MALPVTALLLPLALLLHAARPEVQLVESGGGLVQPGRSLRLSCTASGFTFTDYYMSWVRQAPGKGLEWVGFIRSKADGYTTEYAASVKGRFTISRDDSKSIAYLQMNSLKTEDTAVYYCARDAAYYSYYSPEGAMDYWGQGTLVTVSSGGGGSGGGGSGGGGSMADYKDIQMTQSPSSVSASVGDRVTITCRASQNVDSAVAWYQQKPGKAPKALIYSASYRYSGVPSRFSGSGSGTDFTLTISSLQPEDFATYYCQQYYSTPWTFGQGTKVEIKRGLAVSTISSFFPPGYQIYIWAPLAGTCGVLLLSLVITLYCKRGRKKLLYIFKQPFMRPVQTTQEEDGCSCRFPEEEEGGCELRVKFSRSADAPAYQQGQNQLYNELNLGRREEYDVLDKRRGRDPEMGGKPRRKNPQEGLYNELQKDKMAEAYSEIGMKGERRRGKGHDGLYQGLSTATKDTYDALHMQALPPR

SEQ ID NO: 61 - protein, 470 aa, Artificial sequence
  VH5/VL4
MALPVTALLLPLALLLHAARPEVQLVESGGGLVQPGRSLRLSCTASGFTFTDYYMSWVRQAPGKGLEWVGFIRSKADGYTTEYAASVKGRFTISRDDSKSIAYLQMNSLKTEDTAVYYCARDAAYYSYYSPEGAMDYWGQGTLVTVSSGGGGSGGGGSGGGGSMADYKDIQMTQSPSSVSASVGDRVTITCRASQNVDSAVAWYQQKPGKAPKLLIYSASYRYSGVPSRFSGSGSGTDFTLTISSLQPEDFATYYCQQYYSTPWTFGQGTKVEIKRGLAVSTISSFFPPGYQIYIWAPLAGTCGVLLLSLVITLYCKRGRKKLLYIFKQPFMRPVQTTQEEDGCSCRFPEEEEGGCELRVKFSRSADAPAYQQGQNQLYNELNLGRREEYDVLDKRRGRDPEMGGKPRRKNPQEGLYNELQKDKMAEAYSEIGMKGERRRGKGHDGLYQGLSTATKDTYDALHMQALPPR

SEQ ID NO: 62 - protein, 470 aa, Artificial sequence
  VH5/VL5
MALPVTALLLPLALLLHAARPEVQLVESGGGLVQPGRSLRLSCTASGFTFTDYYMSWVRQAPGKGLEWVGFIRSKADGYTTEYAASVKGRFTISRDDSKSIAYLQMNSLKTEDTAVYYCARDAAYYSYYSPEGAMDYWGQGTLVTVSSGGGGSGGGGSGGGGSMADYKDIQMTQSPSSVSASVGDRVTITCRASQNVDSAVAWYQQKPGKAPKLLIYSASYRQSGVPSRFSGSGSGTDFTLTISSLQPEDFATYYCQQYYSTPWTFGQGTKVEIKRGLAVSTISSFFPPGYQIYIWAPLAGTCGVLLLSLVITLYCKRGRKKLLYIFKQPFMRPVQTTQEEDGCSCRFPEEEEGGCELRVKFSRSADAPAYQQGQNQLYNELNLGRREEYDVLDKRRGRDPEMGGKPRRKNPQEGLYNELQKDKMAEAYSEIGMKGERRRGKGHDGLYQGLSTATKDTYDALHMQALPPR

SEQ ID NO: 63 - protein, 470 aa, Artificial sequence
  VH5/VL6
MALPVTALLLPLALLLHAARPEVQLVESGGGLVQPGRSLRLSCTASGFTFTDYYMSWVRQAPGKGLEWVGFIRSKADGYTTEYAASVKGRFTISRDDSKSIAYLQMNSLKTEDTAVYYCARDAAYYSYYSPEGAMDYWGQGTLVTVSSGGGGSGGGGSGGGGSMADYKDIQMTQSPSSVSASVGDRVTITCRASQNVDSAVAWYQQKPGKAPKLLIYSASYGQSGVPSRFSGSGSGTDFTLTISSLQPEDFATYYCQQYYSTPWTFGQGTKVEIKRGLAVSTISSFFPPGYQIYIWAPLAGTCGVLLLSLVITLYCKRGRKKLLYIFKQPFMRPVQTTQEEDGCSCRFPEEEEGGCELRVKFSRSADAPAYQQGQNQLYNELNLGRREEYDVLDKRRGRDPEMGGKPRRKNPQEGLYNELQKDKMAEAYSEIGMKGERRRGKGHDGLYQGLSTATKDTYDALHMQALPPR

SEQ ID NO: 64 - protein, 470 aa, Artificial sequence
  VH6/VL1
MALPVTALLLPLALLLHAARPEVQLVESGGGLVQPGRSLRLSCTASGFTFTDYYMSWVRQAPGKGLEWVGLIRSKADGYTTEYAASVKGRFTISRDDSKSIAYLQMNSLKTEDTAVYYCARDAAYYSYYSPEGAMDYWGQGTLVTVSSGGGGSGGGGSGGGGSMADYKDIVMTQSPSSVSASVGDRVTITCRASQNVDSAVAWYQQKPGKAPKALIYSASYRYSGVPSRFSGRGSGTDFTLTISSLQPEDFATYYCQQYYSTPWTFGQGTKVEIKRGLAVSTISSFFPPGYQIYIWAPLAGTCGVLLLSLVITLYCKRGRKKLLYIFKQPFMRPVQTTQEEDGCSCRFPEEEEGGCELRVKFSRSADAPAYQQGQNQLYNELNLGRREEYDVLDKRRGRDPEMGGKPRRKNPQEGLYNELQKDKMAEAYSEIGMKGERRRGKGHDGLYQGLSTATKDTYDALHMQALPPR

SEQ ID NO: 65 - protein, 470 aa, Artificial sequence
  VH6/VL2
MALPVTALLLPLALLLHAARPEVQLVESGGGLVQPGRSLRLSCTASGFTFTDYYMSWVRQAPGKGLEWVGLIRSKADGYTTEYAASVKGRFTISRDDSKSIAYLQMNSLKTEDTAVYYCARDAAYYSYYSPEGAMDYWGQGTLVTVSSGGGGSGGGGSGGGGSMADYKDIQMTQSPSSVSASVGDRVTITCRASQNVDSAVAWYQQKPGKAPKALIYSASYRYSGVPSRFSGRGSGTDFTLTISSLQPEDFATYYCQQYYSTPWTFGQGTKVEIKRGLAVSTISSFFPPGYQIYIWAPLAGTCGVLLLSLVITLYCKRGRKKLLYIFKQPFMRPVQTTQEEDGCSCRFPEEEEGGCELRVKFSRSADAPAYQQGQNQLYNELNLGRREEYDVLDKRRGRDPEMGGKPRRKNPQEGLYNELQKDKMAEAYSEIGMKGERRRGKGHDGLYQGLSTATKDTYDALHMQALPPR

SEQ ID NO: 66 - protein, 470 aa, Artificial sequence
  VH6/VL3
MALPVTALLLPLALLLHAARPEVQLVESGGGLVQPGRSLRLSCTASGFTFTDYYMSWVRQAPGKGLEWVGLIRSKADGYTTEYAASVKGRFTISRDDSKSIAYLQMNSLKTEDTAVYYCARDAAYYSYYSPEGAMDYWGQGTLVTVSSGGGGSGGGGSGGGGSMADYKDIQMTQSPSSVSASVGDRVTITCRASQNVDSAVAWYQQKPGKAPKALIYSASYRYSGVPSRFSGSGSGTDFTLTISSLQPEDFATYYCQQYYSTPWTFGQGTKVEIKRGLAVSTISSFFPPGYQIYIWAPLAGTCGVLLLSLVITLYCKRGRKKLLYIFKQPFMRPVQTTQEEDGCSCRFPEEEEGGCELRVKFSRSADAPAYQQGQNQLYNELNLGRREEYDVLDKRRGRDPEMGGKPRRKNPQEGLYNELQKDKMAEAYSEIGMKGERRRGKGHDGLYQGLSTATKDTYDALHMQALPPR

SEQ ID NO: 67 - protein, 470 aa, Artificial sequence
  VH6/VL4
MALPVTALLLPLALLLHAARPEVQLVESGGGLVQPGRSLRLSCTASGFTFTDYYMSWVRQAPGKGLEWVGLIRSKADGYTTEYAASVKGRFTISRDDSKSIAYLQMNSLKTEDTAVYYCARDAAYYSYYSPEGAMDYWGQGTLVTVSSGGGGSGGGGSGGGGSMADYKDIQMTQSPSSVSASVGDRVTITCRASQNVDSAVAWYQQKPGKAPKLLIYSASYRYSGVPSRFSGSGSGTDFTLTISSLQPEDFATYYCQQYYSTPWTFGQGTKVEIKRGLAVSTISSFFPPGYQIYIWAPLAGTCGVLLLSLVITLYCKRGRKKLLYIFKQPFMRPVQTTQEEDGCSCRFPEEEEGGCELRVKFSRSADAPAYQQGQNQLYNELNLGRREEYDVLDKRRGRDPEMGGKPRRKNPQEGLYNELQKDKMAEAYSEIGMKGERRRGKGHDGLYQGLSTATKDTYDALHMQALPPR

SEQ ID NO: 68 - protein, 470 aa, Artificial sequence
  VH6/VL5
MALPVTALLLPLALLLHAARPEVQLVESGGGLVQPGRSLRLSCTASGFTFTDYYMSWVRQAPGKGLEWVGLIRSKADGYTTEYAASVKGRFTISRDDSKSIAYLQMNSLKTEDTAVYYCARDAAYYSYYSPEGAMDYWGQGTLVTVSSGGGGSGGGGSGGGGSMADYKDIQMTQSPSSVSASVGDRVTITCRASQNVDSAVAWYQQKPGKAPKLLIYSASYRQSGVPSRFSGSGSGTDFTLTISSLQPEDFATYYCQQYYSTPWTFGQGTKVEIKRGLAVSTISSFFPPGYQIYIWAPLAGTCGVLLLSLVITLYCKRGRKKLLYIFKQPFMRPVQTTQEEDGCSCRFPEEEEGGCELRVKFSRSADAPAYQQGQNQLYNELNLGRREEYDVLDKRRGRDPEMGGKPRRKNPQEGLYNELQKDKMAEAYSEIGMKGERRRGKGHDGLYQGLSTATKDTYDALHMQALPPR

SEQ ID NO: 69 - protein, 470 aa, Artificial sequence
  VH6/VL6
MALPVTALLLPLALLLHAARPEVQLVESGGGLVQPGRSLRLSCTASGFTFTDYYMSWVRQAPGKGLEWVGLIRSKADGYTTEYAASVKGRFTISRDDSKSIAYLQMNSLKTEDTAVYYCARDAAYYSYYSPEGAMDYWGQGTLVTVSSGGGGSGGGGSGGGGSMADYKDIQMTQSPSSVSASVGDRVTITCRASQNVDSAVAWYQQKPGKAPKLLIYSASYGQSGVPSRFSGSGSGTDFTLTISSLQPEDFATYYCQQYYSTPWTFGQGTKVEIKRGLAVSTISSFFPPGYQIYIWAPLAGTCGVLLLSLVITLYCKRGRKKLLYIFKQPFMRPVQTTQEEDGCSCRFPEEEEGGCELRVKFSRSADAPAYQQGQNQLYNELNLGRREEYDVLDKRRGRDPEMGGKPRRKNPQEGLYNELQKDKMAEAYSEIGMKGERRRGKGHDGLYQGLSTATKDTYDALHMQALPPR

SEQ ID NO: 70 - protein, 470 aa, Artificial sequence
  VH7/VL1
MALPVTALLLPLALLLHAARPEVQLVESGGGLVQPGRSLRLSCTASGFTFTDYYMSWVRQAPGKGLEWVGFIRSKADGYTTEYAASVKGRFTISRDDSKSIAYLQMNSLKTEDTAVYYCTRDAAYYSYYSPEGAMDYWGQGTLVTVSSGGGGSGGGGSGGGGSMADYKDIVMTQSPSSVSASVGDRVTITCRASQNVDSAVAWYQQKPGKAPKALIYSASYRYSGVPSRFSGRGSGTDFTLTISSLQPEDFATYYCQQYYSTPWTFGQGTKVEIKRGLAVSTISSFFPPGYQIYIWAPLAGTCGVLLLSLVITLYCKRGRKKLLYIFKQPFMRPVQTTQEEDGCSCRFPEEEEGGCELRVKFSRSADAPAYQQGQNQLYNELNLGRREEYDVLDKRRGRDPEMGGKPRRKNPQEGLYNELQKDKMAEAYSEIGMKGERRRGKGHDGLYQGLSTATKDTYDALHMQALPPR

SEQ ID NO: 71 - protein, 470 aa, Artificial sequence
  VH7/VL2
MALPVTALLLPLALLLHAARPEVQLVESGGGLVQPGRSLRLSCTASGFTFTDYYMSWVRQAPGKGLEWVGFIRSKADGYTTEYAASVKGRFTISRDDSKSIAYLQMNSLKTEDTAVYYCTRDAAYYSYYSPEGAMDYWGQGTLVTVSSGGGGSGGGGSGGGGSMADYKDIQMTQSPSSVSASVGDRVTITCRASQNVDSAVAWYQQKPGKAPKALIYSASYRYSGVPSRFSGRGSGTDFTLTISSLQPEDFATYYCQQYYSTPWTFGQGTKVEIKRGLAVSTISSFFPPGYQIYIWAPLAGTCGVLLLSLVITLYCKRGRKKLLYIFKQPFMRPVQTTQEEDGCSCRFPEEEEGGCELRVKFSRSADAPAYQQGQNQLYNELNLGRREEYDVLDKRRGRDPEMGGKPRRKNPQEGLYNELQKDKMAEAYSEIGMKGERRRGKGHDGLYQGLSTATKDTYDALHMQALPPR

SEQ ID NO: 72 - protein, 470 aa, Artificial sequence
  VH7/VL3
MALPVTALLLPLALLLHAARPEVQLVESGGGLVQPGRSLRLSCTASGFTFTDYYMSWVRQAPGKGLEWVGFIRSKADGYTTEYAASVKGRFTISRDDSKSIAYLQMNSLKTEDTAVYYCTRDAAYYSYYSPEGAMDYWGQGTLVTVSSGGGGSGGGGSGGGGSMADYKDIQMTQSPSSVSASVGDRVTITCRASQNVDSAVAWYQQKPGKAPKALIYSASYRYSGVPSRFSGSGSGTDFTLTISSLQPEDFATYYCQQYYSTPWTFGQGTKVEIKRGLAVSTISSFFPPGYQIYIWAPLAGTCGVLLLSLVITLYCKRGRKKLLYIFKQPFMRPVQTTQEEDGCSCRFPEEEEGGCELRVKFSRSADAPAYQQGQNQLYNELNLGRREEYDVLDKRRGRDPEMGGKPRRKNPQEGLYNELQKDKMAEAYSEIGMKGERRRGKGHDGLYQGLSTATKDTYDALHMQALPPR

SEQ ID NO: 73 - protein, 470 aa, Artificial sequence
  VH7/VL4
MALPVTALLLPLALLLHAARPEVQLVESGGGLVQPGRSLRLSCTASGFTFTDYYMSWVRQAPGKGLEWVGFIRSKADGYTTEYAASVKGRFTISRDDSKSIAYLQMNSLKTEDTAVYYCTRDAAYYSYYSPEGAMDYWGQGTLVTVSSGGGGSGGGGSGGGGSMADYKDIQMTQSPSSVSASVGDRVTITCRASQNVDSAVAWYQQKPGKAPKLLIYSASYRYSGVPSRFSGSGSGTDFTLTISSLQPEDFATYYCQQYYSTPWTFGQGTKVEIKRGLAVSTISSFFPPGYQIYIWAPLAGTCGVLLLSLVITLYCKRGRKKLLYIFKQPFMRPVQTTQEEDGCSCRFPEEEEGGCELRVKFSRSADAPAYQQGQNQLYNELNLGRREEYDVLDKRRGRDPEMGGKPRRKNPQEGLYNELQKDKMAEAYSEIGMKGERRRGKGHDGLYQGLSTATKDTYDALHMQALPPR

SEQ ID NO: 74 - protein, 470 aa, Artificial sequence
  VH7/VL5
MALPVTALLLPLALLLHAARPEVQLVESGGGLVQPGRSLRLSCTASGFTFTDYYMSWVRQAPGKGLEWVGFIRSKADGYTTEYAASVKGRFTISRDDSKSIAYLQMNSLKTEDTAVYYCTRDAAYYSYYSPEGAMDYWGQGTLVTVSSGGGGSGGGGSGGGGSMADYKDIQMTQSPSSVSASVGDRVTITCRASQNVDSAVAWYQQKPGKAPKLLIYSASYRQSGVPSRFSGSGSGTDFTLTISSLQPEDFATYYCQQYYSTPWTFGQGTKVEIKRGLAVSTISSFFPPGYQIYIWAPLAGTCGVLLLSLVITLYCKRGRKKLLYIFKQPFMRPVQTTQEEDGCSCRFPEEEEGGCELRVKFSRSADAPAYQQGQNQLYNELNLGRREEYDVLDKRRGRDPEMGGKPRRKNPQEGLYNELQKDKMAEAYSEIGMKGERRRGKGHDGLYQGLSTATKDTYDALHMQALPPR

SEQ ID NO: 75 - protein, 470 aa, Artificial sequence
  VH7/VL6
MALPVTALLLPLALLLHAARPEVQLVESGGGLVQPGRSLRLSCTASGFTFTDYYMSWVRQAPGKGLEWVGFIRSKADGYTTEYAASVKGRFTISRDDSKSIAYLQMNSLKTEDTAVYYCTRDAAYYSYYSPEGAMDYWGQGTLVTVSSGGGGSGGGGSGGGGSMADYKDIQMTQSPSSVSASVGDRVTITCRASQNVDSAVAWYQQKPGKAPKLLIYSASYGQSGVPSRFSGSGSGTDFTLTISSLQPEDFATYYCQQYYSTPWTFGQGTKVEIKRGLAVSTISSFFPPGYQIYIWAPLAGTCGVLLLSLVITLYCKRGRKKLLYIFKQPFMRPVQTTQEEDGCSCRFPEEEEGGCELRVKFSRSADAPAYQQGQNQLYNELNLGRREEYDVLDKRRGRDPEMGGKPRRKNPQEGLYNELQKDKMAEAYSEIGMKGERRRGKGHDGLYQGLSTATKDTYDALHMQALPPR

SEQ ID NO: 76 - protein, 499 aa, Artificial sequence
  hKlo43-3 VH1/VL1
MALPVTALLLPLALLLHAARPEVKLVESGGGLVQPGRSLRLSCTASGFTFTDYYMSWVRQAPGKGLEWVGLIRSKADGYTTEYSASVKGRFTISRDDSKSILYLQMNSLKTEDTAVYYCARDAAYYSYYSPEGAMDYWGQGTLVTVSSGGGGSGGGGSGGGGSMADYKDIVMTQSPSSVSASVGDRVTITCRASQNVDSAVAWYQQKPGKAPKALIYSASYRYSGVPSRFSGRGSGTDFTLTISSLQPEDFATYYCQQYYSTPWTFGQGTKVEIKRTTTPAPRPPTPAPTIASQPLSLRPEACRPAAGGAVHTRGLDFACDIYIWAPLAGTCGVLLLSLVITLYCKRGRKKLLYIFKQPFMRPVQTTQEEDGCSCRFPEEEEGGCELRVKFSRSADAPAYQQGQNQLYNELNLGRREEYDVLDKRRGRDPEMGGKPRRKNPQEGLYNELQKDKMAEAYSEIGMKGERRRGKGHDGLYQGLSTATKDTYDALHMQALPPR

SEQ ID NO: 77 - protein, 499 aa, Artificial sequence
  VH1/VL2
MALPVTALLLPLALLLHAARPEVKLVESGGGLVQPGRSLRLSCTASGFTFTDYYMSWVRQAPGKGLEWVGLIRSKADGYTTEYSASVKGRFTISRDDSKSILYLQMNSLKTEDTAVYYCARDAAYYSYYSPEGAMDYWGQGTLVTVSSGGGGSGGGGSGGGGSMADYKDIQMTQSPSSVSASVGDRVTITCRASQNVDSAVAWYQQKPGKAPKALIYSASYRYSGVPSRFSGRGSGTDFTLTISSLQPEDFATYYCQQYYSTPWTFGQGTKVEIKRTTTPAPRPPTPAPTIASQPLSLRPEACRPAAGGAVHTRGLDFACDIYIWAPLAGTCGVLLLSLVITLYCKRGRKKLLYIFKQPFMRPVQTTQEEDGCSCRFPEEEEGGCELRVKFSRSADAPAYQQGQNQLYNELNLGRREEYDVLDKRRGRDPEMGGKPRRKNPQEGLYNELQKDKMAEAYSEIGMKGERRRGKGHDGLYQGLSTATKDTYDALHMQALPPR

SEQ ID NO: 78 - protein, 499 aa, Artificial sequence
  VH1/VL3
MALPVTALLLPLALLLHAARPEVKLVESGGGLVQPGRSLRLSCTASGFTFTDYYMSWVRQAPGKGLEWVGLIRSKADGYTTEYSASVKGRFTISRDDSKSILYLQMNSLKTEDTAVYYCARDAAYYSYYSPEGAMDYWGQGTLVTVSSGGGGSGGGGSGGGGSMADYKDIQMTQSPSSVSASVGDRVTITCRASQNVDSAVAWYQQKPGKAPKALIYSASYRYSGVPSRFSGSGSGTDFTLTISSLQPEDFATYYCQQYYSTPWTFGQGTKVEIKRTTTPAPRPPTPAPTIASQPLSLRPEACRPAAGGAVHTRGLDFACDIYIWAPLAGTCGVLLLSLVITLYCKRGRKKLLYIFKQPFMRPVQTTQEEDGCSCRFPEEEEGGCELRVKFSRSADAPAYQQGQNQLYNELNLGRREEYDVLDKRRGRDPEMGGKPRRKNPQEGLYNELQKDKMAEAYSEIGMKGERRRGKGHDGLYQGLSTATKDTYDALHMQALPPR

SEQ ID NO: 79 - protein, 499 aa, Artificial sequence
  VH1/VL4
MALPVTALLLPLALLLHAARPEVKLVESGGGLVQPGRSLRLSCTASGFTFTDYYMSWVRQAPGKGLEWVGLIRSKADGYTTEYSASVKGRFTISRDDSKSILYLQMNSLKTEDTAVYYCARDAAYYSYYSPEGAMDYWGQGTLVTVSSGGGGSGGGGSGGGGSMADYKDIQMTQSPSSVSASVGDRVTITCRASQNVDSAVAWYQQKPGKAPKLLIYSASYRYSGVPSRFSGSGSGTDFTLTISSLQPEDFATYYCQQYYSTPWTFGQGTKVEIKRTTTPAPRPPTPAPTIASQPLSLRPEACRPAAGGAVHTRGLDFACDIYIWAPLAGTCGVLLLSLVITLYCKRGRKKLLYIFKQPFMRPVQTTQEEDGCSCRFPEEEEGGCELRVKFSRSADAPAYQQGQNQLYNELNLGRREEYDVLDKRRGRDPEMGGKPRRKNPQEGLYNELQKDKMAEAYSEIGMKGERRRGKGHDGLYQGLSTATKDTYDALHMQALPPR

SEQ ID NO: 80 - protein, 499 aa, Artificial sequence
  VH1/VL5
MALPVTALLLPLALLLHAARPEVKLVESGGGLVQPGRSLRLSCTASGFTFTDYYMSWVRQAPGKGLEWVGLIRSKADGYTTEYSASVKGRFTISRDDSKSILYLQMNSLKTEDTAVYYCARDAAYYSYYSPEGAMDYWGQGTLVTVSSGGGGSGGGGSGGGGSMADYKDIQMTQSPSSVSASVGDRVTITCRASQNVDSAVAWYQQKPGKAPKLLIYSASYRQSGVPSRFSGSGSGTDFTLTISSLQPEDFATYYCQQYYSTPWTFGQGTKVEIKRTTTPAPRPPTPAPTIASQPLSLRPEACRPAAGGAVHTRGLDFACDIYIWAPLAGTCGVLLLSLVITLYCKRGRKKLLYIFKQPFMRPVQTTQEEDGCSCRFPEEEEGGCELRVKFSRSADAPAYQQGQNQLYNELNLGRREEYDVLDKRRGRDPEMGGKPRRKNPQEGLYNELQKDKMAEAYSEIGMKGERRRGKGHDGLYQGLSTATKDTYDALHMQALPPR

SEQ ID NO: 81 - protein, 499 aa, Artificial sequence
  VH1/VL6
MALPVTALLLPLALLLHAARPEVKLVESGGGLVQPGRSLRLSCTASGFTFTDYYMSWVRQAPGKGLEWVGLIRSKADGYTTEYSASVKGRFTISRDDSKSILYLQMNSLKTEDTAVYYCARDAAYYSYYSPEGAMDYWGQGTLVTVSSGGGGSGGGGSGGGGSMADYKDIQMTQSPSSVSASVGDRVTITCRASQNVDSAVAWYQQKPGKAPKLLIYSASYGQSGVPSRFSGSGSGTDFTLTISSLQPEDFATYYCQQYYSTPWTFGQGTKVEIKRTTTPAPRPPTPAPTIASQPLSLRPEACRPAAGGAVHTRGLDFACDIYIWAPLAGTCGVLLLSLVITLYCKRGRKKLLYIFKQPFMRPVQTTQEEDGCSCRFPEEEEGGCELRVKFSRSADAPAYQQGQNQLYNELNLGRREEYDVLDKRRGRDPEMGGKPRRKNPQEGLYNELQKDKMAEAYSEIGMKGERRRGKGHDGLYQGLSTATKDTYDALHMQALPPR

SEQ ID NO: 82 - protein, 499 aa, Artificial sequence
  VH2/VL1
MALPVTALLLPLALLLHAARPEVQLVESGGGLVQPGRSLRLSCTASGFTFTDYYMSWVRQAPGKGLEWVGLIRSKADGYTTEYSASVKGRFTISRDDSKSILYLQMNSLKTEDTAVYYCARDAAYYSYYSPEGAMDYWGQGTLVTVSSGGGGSGGGGSGGGGSMADYKDIVMTQSPSSVSASVGDRVTITCRASQNVDSAVAWYQQKPGKAPKALIYSASYRYSGVPSRFSGRGSGTDFTLTISSLQPEDFATYYCQQYYSTPWTFGQGTKVEIKRTTTPAPRPPTPAPTIASQPLSLRPEACRPAAGGAVHTRGLDFACDIYIWAPLAGTCGVLLLSLVITLYCKRGRKKLLYIFKQPFMRPVQTTQEEDGCSCRFPEEEEGGCELRVKFSRSADAPAYQQGQNQLYNELNLGRREEYDVLDKRRGRDPEMGGKPRRKNPQEGLYNELQKDKMAEAYSEIGMKGERRRGKGHDGLYQGLSTATKDTYDALHMQALPPR

SEQ ID NO: 83 - protein, 499 aa, Artificial sequence
  VH2/VL2
MALPVTALLLPLALLLHAARPEVQLVESGGGLVQPGRSLRLSCTASGFTFTDYYMSWVRQAPGKGLEWVGLIRSKADGYTTEYSASVKGRFTISRDDSKSILYLQMNSLKTEDTAVYYCARDAAYYSYYSPEGAMDYWGQGTLVTVSSGGGGSGGGGSGGGGSMADYKDIQMTQSPSSVSASVGDRVTITCRASQNVDSAVAWYQQKPGKAPKALIYSASYRYSGVPSRFSGRGSGTDFTLTISSLQPEDFATYYCQQYYSTPWTFGQGTKVEIKRTTTPAPRPPTPAPTIASQPLSLRPEACRPAAGGAVHTRGLDFACDIYIWAPLAGTCGVLLLSLVITLYCKRGRKKLLYIFKQPFMRPVQTTQEEDGCSCRFPEEEEGGCELRVKFSRSADAPAYQQGQNQLYNELNLGRREEYDVLDKRRGRDPEMGGKPRRKNPQEGLYNELQKDKMAEAYSEIGMKGERRRGKGHDGLYQGLSTATKDTYDALHMQALPPR

SEQ ID NO: 84 - protein, 499 aa, Artificial sequence
  VH2/VL3
MALPVTALLLPLALLLHAARPEVQLVESGGGLVQPGRSLRLSCTASGFTFTDYYMSWVRQAPGKGLEWVGLIRSKADGYTTEYSASVKGRFTISRDDSKSILYLQMNSLKTEDTAVYYCARDAAYYSYYSPEGAMDYWGQGTLVTVSSGGGGSGGGGSGGGGSMADYKDIQMTQSPSSVSASVGDRVTITCRASQNVDSAVAWYQQKPGKAPKALIYSASYRYSGVPSRFSGSGSGTDFTLTISSLQPEDFATYYCQQYYSTPWTFGQGTKVEIKRTTTPAPRPPTPAPTIASQPLSLRPEACRPAAGGAVHTRGLDFACDIYIWAPLAGTCGVLLLSLVITLYCKRGRKKLLYIFKQPFMRPVQTTQEEDGCSCRFPEEEEGGCELRVKFSRSADAPAYQQGQNQLYNELNLGRREEYDVLDKRRGRDPEMGGKPRRKNPQEGLYNELQKDKMAEAYSEIGMKGERRRGKGHDGLYQGLSTATKDTYDALHMQALPPR

SEQ ID NO: 85 - protein, 499 aa, Artificial sequence
  VH2/VL4
MALPVTALLLPLALLLHAARPEVQLVESGGGLVQPGRSLRLSCTASGFTFTDYYMSWVRQAPGKGLEWVGLIRSKADGYTTEYSASVKGRFTISRDDSKSILYLQMNSLKTEDTAVYYCARDAAYYSYYSPEGAMDYWGQGTLVTVSSGGGGSGGGGSGGGGSMADYKDIQMTQSPSSVSASVGDRVTITCRASQNVDSAVAWYQQKPGKAPKLLIYSASYRYSGVPSRFSGSGSGTDFTLTISSLQPEDFATYYCQQYYSTPWTFGQGTKVEIKRTTTPAPRPPTPAPTIASQPLSLRPEACRPAAGGAVHTRGLDFACDIYIWAPLAGTCGVLLLSLVITLYCKRGRKKLLYIFKQPFMRPVQTTQEEDGCSCRFPEEEEGGCELRVKFSRSADAPAYQQGQNQLYNELNLGRREEYDVLDKRRGRDPEMGGKPRRKNPQEGLYNELQKDKMAEAYSEIGMKGERRRGKGHDGLYQGLSTATKDTYDALHMQALPPR

SEQ ID NO: 86 - protein, 499 aa, Artificial sequence
  VH2/VL5
MALPVTALLLPLALLLHAARPEVQLVESGGGLVQPGRSLRLSCTASGFTFTDYYMSWVRQAPGKGLEWVGLIRSKADGYTTEYSASVKGRFTISRDDSKSILYLQMNSLKTEDTAVYYCARDAAYYSYYSPEGAMDYWGQGTLVTVSSGGGGSGGGGSGGGGSMADYKDIQMTQSPSSVSASVGDRVTITCRASQNVDSAVAWYQQKPGKAPKLLIYSASYRQSGVPSRFSGSGSGTDFTLTISSLQPEDFATYYCQQYYSTPWTFGQGTKVEIKRTTTPAPRPPTPAPTIASQPLSLRPEACRPAAGGAVHTRGLDFACDIYIWAPLAGTCGVLLLSLVITLYCKRGRKKLLYIFKQPFMRPVQTTQEEDGCSCRFPEEEEGGCELRVKFSRSADAPAYQQGQNQLYNELNLGRREEYDVLDKRRGRDPEMGGKPRRKNPQEGLYNELQKDKMAEAYSEIGMKGERRRGKGHDGLYQGLSTATKDTYDALHMQALPPR

SEQ ID NO: 87 - protein, 499 aa, Artificial sequence
  VH2/VL6
MALPVTALLLPLALLLHAARPEVQLVESGGGLVQPGRSLRLSCTASGFTFTDYYMSWVRQAPGKGLEWVGLIRSKADGYTTEYSASVKGRFTISRDDSKSILYLQMNSLKTEDTAVYYCARDAAYYSYYSPEGAMDYWGQGTLVTVSSGGGGSGGGGSGGGGSMADYKDIQMTQSPSSVSASVGDRVTITCRASQNVDSAVAWYQQKPGKAPKLLIYSASYGQSGVPSRFSGSGSGTDFTLTISSLQPEDFATYYCQQYYSTPWTFGQGTKVEIKRTTTPAPRPPTPAPTIASQPLSLRPEACRPAAGGAVHTRGLDFACDIYIWAPLAGTCGVLLLSLVITLYCKRGRKKLLYIFKQPFMRPVQTTQEEDGCSCRFPEEEEGGCELRVKFSRSADAPAYQQGQNQLYNELNLGRREEYDVLDKRRGRDPEMGGKPRRKNPQEGLYNELQKDKMAEAYSEIGMKGERRRGKGHDGLYQGLSTATKDTYDALHMQALPPR

SEQ ID NO: 88 - protein, 499 aa, Artificial sequence
  VH3/VL1
MALPVTALLLPLALLLHAARPEVQLVESGGGLVQPGRSLRLSCTASGFTFTDYYMSWVRQAPGKGLEWVGLIRSKADGYTTEYSASVKGRFTISRDDSKSIAYLQMNSLKTEDTAVYYCARDAAYYSYYSPEGAMDYWGQGTLVTVSSGGGGSGGGGSGGGGSMADYKDIVMTQSPSSVSASVGDRVTITCRASQNVDSAVAWYQQKPGKAPKALIYSASYRYSGVPSRFSGRGSGTDFTLTISSLQPEDFATYYCQQYYSTPWTFGQGTKVEIKRTTTPAPRPPTPAPTIASQPLSLRPEACRPAAGGAVHTRGLDFACDIYIWAPLAGTCGVLLLSLVITLYCKRGRKKLLYIFKQPFMRPVQTTQEEDGCSCRFPEEEEGGCELRVKFSRSADAPAYQQGQNQLYNELNLGRREEYDVLDKRRGRDPEMGGKPRRKNPQEGLYNELQKDKMAEAYSEIGMKGERRRGKGHDGLYQGLSTATKDTYDALHMQALPPR

SEQ ID NO: 89 - protein, 499 aa, Artificial sequence
  VH3/VL2
MALPVTALLLPLALLLHAARPEVQLVESGGGLVQPGRSLRLSCTASGFTFTDYYMSWVRQAPGKGLEWVGLIRSKADGYTTEYSASVKGRFTISRDDSKSIAYLQMNSLKTEDTAVYYCARDAAYYSYYSPEGAMDYWGQGTLVTVSSGGGGSGGGGSGGGGSMADYKDIQMTQSPSSVSASVGDRVTITCRASQNVDSAVAWYQQKPGKAPKALIYSASYRYSGVPSRFSGRGSGTDFTLTISSLQPEDFATYYCQQYYSTPWTFGQGTKVEIKRTTTPAPRPPTPAPTIASQPLSLRPEACRPAAGGAVHTRGLDFACDIYIWAPLAGTCGVLLLSLVITLYCKRGRKKLLYIFKQPFMRPVQTTQEEDGCSCRFPEEEEGGCELRVKFSRSADAPAYQQGQNQLYNELNLGRREEYDVLDKRRGRDPEMGGKPRRKNPQEGLYNELQKDKMAEAYSEIGMKGERRRGKGHDGLYQGLSTATKDTYDALHMQALPPR

SEQ ID NO: 90 - protein, 499 aa, Artificial sequence
  VH3/VL3
MALPVTALLLPLALLLHAARPEVQLVESGGGLVQPGRSLRLSCTASGFTFTDYYMSWVRQAPGKGLEWVGLIRSKADGYTTEYSASVKGRFTISRDDSKSIAYLQMNSLKTEDTAVYYCARDAAYYSYYSPEGAMDYWGQGTLVTVSSGGGGSGGGGSGGGGSMADYKDIQMTQSPSSVSASVGDRVTITCRASQNVDSAVAWYQQKPGKAPKALIYSASYRYSGVPSRFSGSGSGTDFTLTISSLQPEDFATYYCQQYYSTPWTFGQGTKVEIKRTTTPAPRPPTPAPTIASQPLSLRPEACRPAAGGAVHTRGLDFACDIYIWAPLAGTCGVLLLSLVITLYCKRGRKKLLYIFKQPFMRPVQTTQEEDGCSCRFPEEEEGGCELRVKFSRSADAPAYQQGQNQLYNELNLGRREEYDVLDKRRGRDPEMGGKPRRKNPQEGLYNELQKDKMAEAYSEIGMKGERRRGKGHDGLYQGLSTATKDTYDALHMQALPPR

SEQ ID NO: 91 - protein, 499 aa, Artificial sequence
  VH3/VL4
MALPVTALLLPLALLLHAARPEVQLVESGGGLVQPGRSLRLSCTASGFTFTDYYMSWVRQAPGKGLEWVGLIRSKADGYTTEYSASVKGRFTISRDDSKSIAYLQMNSLKTEDTAVYYCARDAAYYSYYSPEGAMDYWGQGTLVTVSSGGGGSGGGGSGGGGSMADYKDIQMTQSPSSVSASVGDRVTITCRASQNVDSAVAWYQQKPGKAPKLLIYSASYRYSGVPSRFSGSGSGTDFTLTISSLQPEDFATYYCQQYYSTPWTFGQGTKVEIKRTTTPAPRPPTPAPTIASQPLSLRPEACRPAAGGAVHTRGLDFACDIYIWAPLAGTCGVLLLSLVITLYCKRGRKKLLYIFKQPFMRPVQTTQEEDGCSCRFPEEEEGGCELRVKFSRSADAPAYQQGQNQLYNELNLGRREEYDVLDKRRGRDPEMGGKPRRKNPQEGLYNELQKDKMAEAYSEIGMKGERRRGKGHDGLYQGLSTATKDTYDALHMQALPPR

SEQ ID NO: 92 - protein, 499 aa, Artificial sequence
  VH3/VL5
MALPVTALLLPLALLLHAARPEVQLVESGGGLVQPGRSLRLSCTASGFTFTDYYMSWVRQAPGKGLEWVGLIRSKADGYTTEYSASVKGRFTISRDDSKSIAYLQMNSLKTEDTAVYYCARDAAYYSYYSPEGAMDYWGQGTLVTVSSGGGGSGGGGSGGGGSMADYKDIQMTQSPSSVSASVGDRVTITCRASQNVDSAVAWYQQKPGKAPKLLIYSASYRQSGVPSRFSGSGSGTDFTLTISSLQPEDFATYYCQQYYSTPWTFGQGTKVEIKRTTTPAPRPPTPAPTIASQPLSLRPEACRPAAGGAVHTRGLDFACDIYIWAPLAGTCGVLLLSLVITLYCKRGRKKLLYIFKQPFMRPVQTTQEEDGCSCRFPEEEEGGCELRVKFSRSADAPAYQQGQNQLYNELNLGRREEYDVLDKRRGRDPEMGGKPRRKNPQEGLYNELQKDKMAEAYSEIGMKGERRRGKGHDGLYQGLSTATKDTYDALHMQALPPR

SEQ ID NO: 93 - protein, 499 aa, Artificial sequence
  VH3/VL6
MALPVTALLLPLALLLHAARPEVQLVESGGGLVQPGRSLRLSCTASGFTFTDYYMSWVRQAPGKGLEWVGLIRSKADGYTTEYSASVKGRFTISRDDSKSIAYLQMNSLKTEDTAVYYCARDAAYYSYYSPEGAMDYWGQGTLVTVSSGGGGSGGGGSGGGGSMADYKDIQMTQSPSSVSASVGDRVTITCRASQNVDSAVAWYQQKPGKAPKLLIYSASYGQSGVPSRFSGSGSGTDFTLTISSLQPEDFATYYCQQYYSTPWTFGQGTKVEIKRTTTPAPRPPTPAPTIASQPLSLRPEACRPAAGGAVHTRGLDFACDIYIWAPLAGTCGVLLLSLVITLYCKRGRKKLLYIFKQPFMRPVQTTQEEDGCSCRFPEEEEGGCELRVKFSRSADAPAYQQGQNQLYNELNLGRREEYDVLDKRRGRDPEMGGKPRRKNPQEGLYNELQKDKMAEAYSEIGMKGERRRGKGHDGLYQGLSTATKDTYDALHMQALPPR

SEQ ID NO: 94 - protein, 499 aa, Artificial sequence
  VH4/VL1
MALPVTALLLPLALLLHAARPEVQLVESGGGLVQPGRSLRLSCTASGFTFTDYYMSWVRQAPGKGLEWVGFIRSKADGYTTEYSASVKGRFTISRDDSKSIAYLQMNSLKTEDTAVYYCARDAAYYSYYSPEGAMDYWGQGTLVTVSSGGGGSGGGGSGGGGSMADYKDIVMTQSPSSVSASVGDRVTITCRASQNVDSAVAWYQQKPGKAPKALIYSASYRYSGVPSRFSGRGSGTDFTLTISSLQPEDFATYYCQQYYSTPWTFGQGTKVEIKRTTTPAPRPPTPAPTIASQPLSLRPEACRPAAGGAVHTRGLDFACDIYIWAPLAGTCGVLLLSLVITLYCKRGRKKLLYIFKQPFMRPVQTTQEEDGCSCRFPEEEEGGCELRVKFSRSADAPAYQQGQNQLYNELNLGRREEYDVLDKRRGRDPEMGGKPRRKNPQEGLYNELQKDKMAEAYSEIGMKGERRRGKGHDGLYQGLSTATKDTYDALHMQALPPR

SEQ ID NO: 95 - protein, 499 aa, Artificial sequence
  VH4/VL2
MALPVTALLLPLALLLHAARPEVQLVESGGGLVQPGRSLRLSCTASGFTFTDYYMSWVRQAPGKGLEWVGFIRSKADGYTTEYSASVKGRFTISRDDSKSIAYLQMNSLKTEDTAVYYCARDAAYYSYYSPEGAMDYWGQGTLVTVSSGGGGSGGGGSGGGGSMADYKDIQMTQSPSSVSASVGDRVTITCRASQNVDSAVAWYQQKPGKAPKALIYSASYRYSGVPSRFSGRGSGTDFTLTISSLQPEDFATYYCQQYYSTPWTFGQGTKVEIKRTTTPAPRPPTPAPTIASQPLSLRPEACRPAAGGAVHTRGLDFACDIYIWAPLAGTCGVLLLSLVITLYCKRGRKKLLYIFKQPFMRPVQTTQEEDGCSCRFPEEEEGGCELRVKFSRSADAPAYQQGQNQLYNELNLGRREEYDVLDKRRGRDPEMGGKPRRKNPQEGLYNELQKDKMAEAYSEIGMKGERRRGKGHDGLYQGLSTATKDTYDALHMQALPPR

SEQ ID NO: 96 - protein, 499 aa, Artificial sequence
  VH4/VL3
MALPVTALLLPLALLLHAARPEVQLVESGGGLVQPGRSLRLSCTASGFTFTDYYMSWVRQAPGKGLEWVGFIRSKADGYTTEYSASVKGRFTISRDDSKSIAYLQMNSLKTEDTAVYYCARDAAYYSYYSPEGAMDYWGQGTLVTVSSGGGGSGGGGSGGGGSMADYKDIQMTQSPSSVSASVGDRVTITCRASQNVDSAVAWYQQKPGKAPKALIYSASYRYSGVPSRFSGSGSGTDFTLTISSLQPEDFATYYCQQYYSTPWTFGQGTKVEIKRTTTPAPRPPTPAPTIASQPLSLRPEACRPAAGGAVHTRGLDFACDIYIWAPLAGTCGVLLLSLVITLYCKRGRKKLLYIFKQPFMRPVQTTQEEDGCSCRFPEEEEGGCELRVKFSRSADAPAYQQGQNQLYNELNLGRREEYDVLDKRRGRDPEMGGKPRRKNPQEGLYNELQKDKMAEAYSEIGMKGERRRGKGHDGLYQGLSTATKDTYDALHMQALPPR

SEQ ID NO: 97 - protein, 499 aa, Artificial sequence
  VH4/VL4
MALPVTALLLPLALLLHAARPEVQLVESGGGLVQPGRSLRLSCTASGFTFTDYYMSWVRQAPGKGLEWVGFIRSKADGYTTEYSASVKGRFTISRDDSKSIAYLQMNSLKTEDTAVYYCARDAAYYSYYSPEGAMDYWGQGTLVTVSSGGGGSGGGGSGGGGSMADYKDIQMTQSPSSVSASVGDRVTITCRASQNVDSAVAWYQQKPGKAPKLLIYSASYRYSGVPSRFSGSGSGTDFTLTISSLQPEDFATYYCQQYYSTPWTFGQGTKVEIKRTTTPAPRPPTPAPTIASQPLSLRPEACRPAAGGAVHTRGLDFACDIYIWAPLAGTCGVLLLSLVITLYCKRGRKKLLYIFKQPFMRPVQTTQEEDGCSCRFPEEEEGGCELRVKFSRSADAPAYQQGQNQLYNELNLGRREEYDVLDKRRGRDPEMGGKPRRKNPQEGLYNELQKDKMAEAYSEIGMKGERRRGKGHDGLYQGLSTATKDTYDALHMQALPPR

SEQ ID NO: 98 - protein, 499 aa, Artificial sequence
  VH4/VL5
MALPVTALLLPLALLLHAARPEVQLVESGGGLVQPGRSLRLSCTASGFTFTDYYMSWVRQAPGKGLEWVGFIRSKADGYTTEYSASVKGRFTISRDDSKSIAYLQMNSLKTEDTAVYYCARDAAYYSYYSPEGAMDYWGQGTLVTVSSGGGGSGGGGSGGGGSMADYKDIQMTQSPSSVSASVGDRVTITCRASQNVDSAVAWYQQKPGKAPKLLIYSASYRQSGVPSRFSGSGSGTDFTLTISSLQPEDFATYYCQQYYSTPWTFGQGTKVEIKRTTTPAPRPPTPAPTIASQPLSLRPEACRPAAGGAVHTRGLDFACDIYIWAPLAGTCGVLLLSLVITLYCKRGRKKLLYIFKQPFMRPVQTTQEEDGCSCRFPEEEEGGCELRVKFSRSADAPAYQQGQNQLYNELNLGRREEYDVLDKRRGRDPEMGGKPRRKNPQEGLYNELQKDKMAEAYSEIGMKGERRRGKGHDGLYQGLSTATKDTYDALHMQALPPR

SEQ ID NO: 99 - protein, 499 aa, Artificial sequence
  VH4/VL6
MALPVTALLLPLALLLHAARPEVQLVESGGGLVQPGRSLRLSCTASGFTFTDYYMSWVRQAPGKGLEWVGFIRSKADGYTTEYSASVKGRFTISRDDSKSIAYLQMNSLKTEDTAVYYCARDAAYYSYYSPEGAMDYWGQGTLVTVSSGGGGSGGGGSGGGGSMADYKDIQMTQSPSSVSASVGDRVTITCRASQNVDSAVAWYQQKPGKAPKLLIYSASYGQSGVPSRFSGSGSGTDFTLTISSLQPEDFATYYCQQYYSTPWTFGQGTKVEIKRTTTPAPRPPTPAPTIASQPLSLRPEACRPAAGGAVHTRGLDFACDIYIWAPLAGTCGVLLLSLVITLYCKRGRKKLLYIFKQPFMRPVQTTQEEDGCSCRFPEEEEGGCELRVKFSRSADAPAYQQGQNQLYNELNLGRREEYDVLDKRRGRDPEMGGKPRRKNPQEGLYNELQKDKMAEAYSEIGMKGERRRGKGHDGLYQGLSTATKDTYDALHMQALPPR

SEQ ID NO: 100 - protein, 499 aa, Artificial sequence
  VH5/VL1
MALPVTALLLPLALLLHAARPEVQLVESGGGLVQPGRSLRLSCTASGFTFTDYYMSWVRQAPGKGLEWVGFIRSKADGYTTEYAASVKGRFTISRDDSKSIAYLQMNSLKTEDTAVYYCARDAAYYSYYSPEGAMDYWGQGTLVTVSSGGGGSGGGGSGGGGSMADYKDIVMTQSPSSVSASVGDRVTITCRASQNVDSAVAWYQQKPGKAPKALIYSASYRYSGVPSRFSGRGSGTDFTLTISSLQPEDFATYYCQQYYSTPWTFGQGTKVEIKRTTTPAPRPPTPAPTIASQPLSLRPEACRPAAGGAVHTRGLDFACDIYIWAPLAGTCGVLLLSLVITLYCKRGRKKLLYIFKQPFMRPVQTTQEEDGCSCRFPEEEEGGCELRVKFSRSADAPAYQQGQNQLYNELNLGRREEYDVLDKRRGRDPEMGGKPRRKNPQEGLYNELQKDKMAEAYSEIGMKGERRRGKGHDGLYQGLSTATKDTYDALHMQALPPR

SEQ ID NO: 101 - protein, 499 aa, Artificial sequence
  VH5/VL2
MALPVTALLLPLALLLHAARPEVQLVESGGGLVQPGRSLRLSCTASGFTFTDYYMSWVRQAPGKGLEWVGFIRSKADGYTTEYAASVKGRFTISRDDSKSIAYLQMNSLKTEDTAVYYCARDAAYYSYYSPEGAMDYWGQGTLVTVSSGGGGSGGGGSGGGGSMADYKDIQMTQSPSSVSASVGDRVTITCRASQNVDSAVAWYQQKPGKAPKALIYSASYRYSGVPSRFSGRGSGTDFTLTISSLQPEDFATYYCQQYYSTPWTFGQGTKVEIKRTTTPAPRPPTPAPTIASQPLSLRPEACRPAAGGAVHTRGLDFACDIYIWAPLAGTCGVLLLSLVITLYCKRGRKKLLYIFKQPFMRPVQTTQEEDGCSCRFPEEEEGGCELRVKFSRSADAPAYQQGQNQLYNELNLGRREEYDVLDKRRGRDPEMGGKPRRKNPQEGLYNELQKDKMAEAYSEIGMKGERRRGKGHDGLYQGLSTATKDTYDALHMQALPPR

SEQ ID NO: 102 - protein, 499 aa, Artificial sequence
  VH5/VL3
MALPVTALLLPLALLLHAARPEVQLVESGGGLVQPGRSLRLSCTASGFTFTDYYMSWVRQAPGKGLEWVGFIRSKADGYTTEYAASVKGRFTISRDDSKSIAYLQMNSLKTEDTAVYYCARDAAYYSYYSPEGAMDYWGQGTLVTVSSGGGGSGGGGSGGGGSMADYKDIQMTQSPSSVSASVGDRVTITCRASQNVDSAVAWYQQKPGKAPKALIYSASYRYSGVPSRFSGSGSGTDFTLTISSLQPEDFATYYCQQYYSTPWTFGQGTKVEIKRTTTPAPRPPTPAPTIASQPLSLRPEACRPAAGGAVHTRGLDFACDIYIWAPLAGTCGVLLLSLVITLYCKRGRKKLLYIFKQPFMRPVQTTQEEDGCSCRFPEEEEGGCELRVKFSRSADAPAYQQGQNQLYNELNLGRREEYDVLDKRRGRDPEMGGKPRRKNPQEGLYNELQKDKMAEAYSEIGMKGERRRGKGHDGLYQGLSTATKDTYDALHMQALPPR

SEQ ID NO: 103 - protein, 499 aa, Artificial sequence
  VH5/VL4
MALPVTALLLPLALLLHAARPEVQLVESGGGLVQPGRSLRLSCTASGFTFTDYYMSWVRQAPGKGLEWVGFIRSKADGYTTEYAASVKGRFTISRDDSKSIAYLQMNSLKTEDTAVYYCARDAAYYSYYSPEGAMDYWGQGTLVTVSSGGGGSGGGGSGGGGSMADYKDIQMTQSPSSVSASVGDRVTITCRASQNVDSAVAWYQQKPGKAPKLLIYSASYRYSGVPSRFSGSGSGTDFTLTISSLQPEDFATYYCQQYYSTPWTFGQGTKVEIKRTTTPAPRPPTPAPTIASQPLSLRPEACRPAAGGAVHTRGLDFACDIYIWAPLAGTCGVLLLSLVITLYCKRGRKKLLYIFKQPFMRPVQTTQEEDGCSCRFPEEEEGGCELRVKFSRSADAPAYQQGQNQLYNELNLGRREEYDVLDKRRGRDPEMGGKPRRKNPQEGLYNELQKDKMAEAYSEIGMKGERRRGKGHDGLYQGLSTATKDTYDALHMQALPPR

SEQ ID NO: 104 - protein, 499 aa, Artificial sequence
  VH5/VL5
MALPVTALLLPLALLLHAARPEVQLVESGGGLVQPGRSLRLSCTASGFTFTDYYMSWVRQAPGKGLEWVGFIRSKADGYTTEYAASVKGRFTISRDDSKSIAYLQMNSLKTEDTAVYYCARDAAYYSYYSPEGAMDYWGQGTLVTVSSGGGGSGGGGSGGGGSMADYKDIQMTQSPSSVSASVGDRVTITCRASQNVDSAVAWYQQKPGKAPKLLIYSASYRQSGVPSRFSGSGSGTDFTLTISSLQPEDFATYYCQQYYSTPWTFGQGTKVEIKRTTTPAPRPPTPAPTIASQPLSLRPEACRPAAGGAVHTRGLDFACDIYIWAPLAGTCGVLLLSLVITLYCKRGRKKLLYIFKQPFMRPVQTTQEEDGCSCRFPEEEEGGCELRVKFSRSADAPAYQQGQNQLYNELNLGRREEYDVLDKRRGRDPEMGGKPRRKNPQEGLYNELQKDKMAEAYSEIGMKGERRRGKGHDGLYQGLSTATKDTYDALHMQALPPR

SEQ ID NO: 105 - protein, 499 aa, Artificial sequence
  VH5/VL6
MALPVTALLLPLALLLHAARPEVQLVESGGGLVQPGRSLRLSCTASGFTFTDYYMSWVRQAPGKGLEWVGFIRSKADGYTTEYAASVKGRFTISRDDSKSIAYLQMNSLKTEDTAVYYCARDAAYYSYYSPEGAMDYWGQGTLVTVSSGGGGSGGGGSGGGGSMADYKDIQMTQSPSSVSASVGDRVTITCRASQNVDSAVAWYQQKPGKAPKLLIYSASYGQSGVPSRFSGSGSGTDFTLTISSLQPEDFATYYCQQYYSTPWTFGQGTKVEIKRTTTPAPRPPTPAPTIASQPLSLRPEACRPAAGGAVHTRGLDFACDIYIWAPLAGTCGVLLLSLVITLYCKRGRKKLLYIFKQPFMRPVQTTQEEDGCSCRFPEEEEGGCELRVKFSRSADAPAYQQGQNQLYNELNLGRREEYDVLDKRRGRDPEMGGKPRRKNPQEGLYNELQKDKMAEAYSEIGMKGERRRGKGHDGLYQGLSTATKDTYDALHMQALPPR

SEQ ID NO: 106 - protein, 499 aa, Artificial sequence
  VH6/VL1
MALPVTALLLPLALLLHAARPEVQLVESGGGLVQPGRSLRLSCTASGFTFTDYYMSWVRQAPGKGLEWVGLIRSKADGYTTEYAASVKGRFTISRDDSKSIAYLQMNSLKTEDTAVYYCARDAAYYSYYSPEGAMDYWGQGTLVTVSSGGGGSGGGGSGGGGSMADYKDIVMTQSPSSVSASVGDRVTITCRASQNVDSAVAWYQQKPGKAPKALIYSASYRYSGVPSRFSGRGSGTDFTLTISSLQPEDFATYYCQQYYSTPWTFGQGTKVEIKRTTTPAPRPPTPAPTIASQPLSLRPEACRPAAGGAVHTRGLDFACDIYIWAPLAGTCGVLLLSLVITLYCKRGRKKLLYIFKQPFMRPVQTTQEEDGCSCRFPEEEEGGCELRVKFSRSADAPAYQQGQNQLYNELNLGRREEYDVLDKRRGRDPEMGGKPRRKNPQEGLYNELQKDKMAEAYSEIGMKGERRRGKGHDGLYQGLSTATKDTYDALHMQALPPR

SEQ ID NO: 107 - protein, 499 aa, Artificial sequence
  VH6/VL2
MALPVTALLLPLALLLHAARPEVQLVESGGGLVQPGRSLRLSCTASGFTFTDYYMSWVRQAPGKGLEWVGLIRSKADGYTTEYAASVKGRFTISRDDSKSIAYLQMNSLKTEDTAVYYCARDAAYYSYYSPEGAMDYWGQGTLVTVSSGGGGSGGGGSGGGGSMADYKDIQMTQSPSSVSASVGDRVTITCRASQNVDSAVAWYQQKPGKAPKALIYSASYRYSGVPSRFSGRGSGTDFTLTISSLQPEDFATYYCQQYYSTPWTFGQGTKVEIKRTTTPAPRPPTPAPTIASQPLSLRPEACRPAAGGAVHTRGLDFACDIYIWAPLAGTCGVLLLSLVITLYCKRGRKKLLYIFKQPFMRPVQTTQEEDGCSCRFPEEEEGGCELRVKFSRSADAPAYQQGQNQLYNELNLGRREEYDVLDKRRGRDPEMGGKPRRKNPQEGLYNELQKDKMAEAYSEIGMKGERRRGKGHDGLYQGLSTATKDTYDALHMQALPPR

SEQ ID NO: 108 - protein, 499 aa, Artificial sequence
  VH6/VL3
MALPVTALLLPLALLLHAARPEVQLVESGGGLVQPGRSLRLSCTASGFTFTDYYMSWVRQAPGKGLEWVGLIRSKADGYTTEYAASVKGRFTISRDDSKSIAYLQMNSLKTEDTAVYYCARDAAYYSYYSPEGAMDYWGQGTLVTVSSGGGGSGGGGSGGGGSMADYKDIQMTQSPSSVSASVGDRVTITCRASQNVDSAVAWYQQKPGKAPKALIYSASYRYSGVPSRFSGSGSGTDFTLTISSLQPEDFATYYCQQYYSTPWTFGQGTKVEIKRTTTPAPRPPTPAPTIASQPLSLRPEACRPAAGGAVHTRGLDFACDIYIWAPLAGTCGVLLLSLVITLYCKRGRKKLLYIFKQPFMRPVQTTQEEDGCSCRFPEEEEGGCELRVKFSRSADAPAYQQGQNQLYNELNLGRREEYDVLDKRRGRDPEMGGKPRRKNPQEGLYNELQKDKMAEAYSEIGMKGERRRGKGHDGLYQGLSTATKDTYDALHMQALPPR

SEQ ID NO: 109 - protein, 499 aa, Artificial sequence
  VH6/VL4
MALPVTALLLPLALLLHAARPEVQLVESGGGLVQPGRSLRLSCTASGFTFTDYYMSWVRQAPGKGLEWVGLIRSKADGYTTEYAASVKGRFTISRDDSKSIAYLQMNSLKTEDTAVYYCARDAAYYSYYSPEGAMDYWGQGTLVTVSSGGGGSGGGGSGGGGSMADYKDIQMTQSPSSVSASVGDRVTITCRASQNVDSAVAWYQQKPGKAPKLLIYSASYRYSGVPSRFSGSGSGTDFTLTISSLQPEDFATYYCQQYYSTPWTFGQGTKVEIKRTTTPAPRPPTPAPTIASQPLSLRPEACRPAAGGAVHTRGLDFACDIYIWAPLAGTCGVLLLSLVITLYCKRGRKKLLYIFKQPFMRPVQTTQEEDGCSCRFPEEEEGGCELRVKFSRSADAPAYQQGQNQLYNELNLGRREEYDVLDKRRGRDPEMGGKPRRKNPQEGLYNELQKDKMAEAYSEIGMKGERRRGKGHDGLYQGLSTATKDTYDALHMQALPPR

SEQ ID NO: 110 - protein, 499 aa, Artificial sequence
  VH6/VL5
MALPVTALLLPLALLLHAARPEVQLVESGGGLVQPGRSLRLSCTASGFTFTDYYMSWVRQAPGKGLEWVGLIRSKADGYTTEYAASVKGRFTISRDDSKSIAYLQMNSLKTEDTAVYYCARDAAYYSYYSPEGAMDYWGQGTLVTVSSGGGGSGGGGSGGGGSMADYKDIQMTQSPSSVSASVGDRVTITCRASQNVDSAVAWYQQKPGKAPKLLIYSASYRQSGVPSRFSGSGSGTDFTLTISSLQPEDFATYYCQQYYSTPWTFGQGTKVEIKRTTTPAPRPPTPAPTIASQPLSLRPEACRPAAGGAVHTRGLDFACDIYIWAPLAGTCGVLLLSLVITLYCKRGRKKLLYIFKQPFMRPVQTTQEEDGCSCRFPEEEEGGCELRVKFSRSADAPAYQQGQNQLYNELNLGRREEYDVLDKRRGRDPEMGGKPRRKNPQEGLYNELQKDKMAEAYSEIGMKGERRRGKGHDGLYQGLSTATKDTYDALHMQALPPR

SEQ ID NO: 111 - protein, 499 aa, Artificial sequence
  VH6/VL6
MALPVTALLLPLALLLHAARPEVQLVESGGGLVQPGRSLRLSCTASGFTFTDYYMSWVRQAPGKGLEWVGLIRSKADGYTTEYAASVKGRFTISRDDSKSIAYLQMNSLKTEDTAVYYCARDAAYYSYYSPEGAMDYWGQGTLVTVSSGGGGSGGGGSGGGGSMADYKDIQMTQSPSSVSASVGDRVTITCRASQNVDSAVAWYQQKPGKAPKLLIYSASYGQSGVPSRFSGSGSGTDFTLTISSLQPEDFATYYCQQYYSTPWTFGQGTKVEIKRTTTPAPRPPTPAPTIASQPLSLRPEACRPAAGGAVHTRGLDFACDIYIWAPLAGTCGVLLLSLVITLYCKRGRKKLLYIFKQPFMRPVQTTQEEDGCSCRFPEEEEGGCELRVKFSRSADAPAYQQGQNQLYNELNLGRREEYDVLDKRRGRDPEMGGKPRRKNPQEGLYNELQKDKMAEAYSEIGMKGERRRGKGHDGLYQGLSTATKDTYDALHMQALPPR

SEQ ID NO: 112 - protein, 499 aa, Artificial sequence
  VH7/VL1
MALPVTALLLPLALLLHAARPEVQLVESGGGLVQPGRSLRLSCTASGFTFTDYYMSWVRQAPGKGLEWVGFIRSKADGYTTEYAASVKGRFTISRDDSKSIAYLQMNSLKTEDTAVYYCTRDAAYYSYYSPEGAMDYWGQGTLVTVSSGGGGSGGGGSGGGGSMADYKDIVMTQSPSSVSASVGDRVTITCRASQNVDSAVAWYQQKPGKAPKALIYSASYRYSGVPSRFSGRGSGTDFTLTISSLQPEDFATYYCQQYYSTPWTFGQGTKVEIKRTTTPAPRPPTPAPTIASQPLSLRPEACRPAAGGAVHTRGLDFACDIYIWAPLAGTCGVLLLSLVITLYCKRGRKKLLYIFKQPFMRPVQTTQEEDGCSCRFPEEEEGGCELRVKFSRSADAPAYQQGQNQLYNELNLGRREEYDVLDKRRGRDPEMGGKPRRKNPQEGLYNELQKDKMAEAYSEIGMKGERRRGKGHDGLYQGLSTATKDTYDALHMQALPPR

SEQ ID NO: 113 - protein, 499 aa, Artificial sequence
  VH7/VL2
MALPVTALLLPLALLLHAARPEVQLVESGGGLVQPGRSLRLSCTASGFTFTDYYMSWVRQAPGKGLEWVGFIRSKADGYTTEYAASVKGRFTISRDDSKSIAYLQMNSLKTEDTAVYYCTRDAAYYSYYSPEGAMDYWGQGTLVTVSSGGGGSGGGGSGGGGSMADYKDIQMTQSPSSVSASVGDRVTITCRASQNVDSAVAWYQQKPGKAPKALIYSASYRYSGVPSRFSGRGSGTDFTLTISSLQPEDFATYYCQQYYSTPWTFGQGTKVEIKRTTTPAPRPPTPAPTIASQPLSLRPEACRPAAGGAVHTRGLDFACDIYIWAPLAGTCGVLLLSLVITLYCKRGRKKLLYIFKQPFMRPVQTTQEEDGCSCRFPEEEEGGCELRVKFSRSADAPAYQQGQNQLYNELNLGRREEYDVLDKRRGRDPEMGGKPRRKNPQEGLYNELQKDKMAEAYSEIGMKGERRRGKGHDGLYQGLSTATKDTYDALHMQALPPR

SEQ ID NO: 114 - protein, 499 aa, Artificial sequence
  VH7/VL3
MALPVTALLLPLALLLHAARPEVQLVESGGGLVQPGRSLRLSCTASGFTFTDYYMSWVRQAPGKGLEWVGFIRSKADGYTTEYAASVKGRFTISRDDSKSIAYLQMNSLKTEDTAVYYCTRDAAYYSYYSPEGAMDYWGQGTLVTVSSGGGGSGGGGSGGGGSMADYKDIQMTQSPSSVSASVGDRVTITCRASQNVDSAVAWYQQKPGKAPKALIYSASYRYSGVPSRFSGSGSGTDFTLTISSLQPEDFATYYCQQYYSTPWTFGQGTKVEIKRTTTPAPRPPTPAPTIASQPLSLRPEACRPAAGGAVHTRGLDFACDIYIWAPLAGTCGVLLLSLVITLYCKRGRKKLLYIFKQPFMRPVQTTQEEDGCSCRFPEEEEGGCELRVKFSRSADAPAYQQGQNQLYNELNLGRREEYDVLDKRRGRDPEMGGKPRRKNPQEGLYNELQKDKMAEAYSEIGMKGERRRGKGHDGLYQGLSTATKDTYDALHMQALPPR

SEQ ID NO: 115 - protein, 499 aa, Artificial sequence
  VH7/VL4
MALPVTALLLPLALLLHAARPEVQLVESGGGLVQPGRSLRLSCTASGFTFTDYYMSWVRQAPGKGLEWVGFIRSKADGYTTEYAASVKGRFTISRDDSKSIAYLQMNSLKTEDTAVYYCTRDAAYYSYYSPEGAMDYWGQGTLVTVSSGGGGSGGGGSGGGGSMADYKDIQMTQSPSSVSASVGDRVTITCRASQNVDSAVAWYQQKPGKAPKLLIYSASYRYSGVPSRFSGSGSGTDFTLTISSLQPEDFATYYCQQYYSTPWTFGQGTKVEIKRTTTPAPRPPTPAPTIASQPLSLRPEACRPAAGGAVHTRGLDFACDIYIWAPLAGTCGVLLLSLVITLYCKRGRKKLLYIFKQPFMRPVQTTQEEDGCSCRFPEEEEGGCELRVKFSRSADAPAYQQGQNQLYNELNLGRREEYDVLDKRRGRDPEMGGKPRRKNPQEGLYNELQKDKMAEAYSEIGMKGERRRGKGHDGLYQGLSTATKDTYDALHMQALPPR

SEQ ID NO: 116 - protein, 499 aa, Artificial sequence
  VH7/VL5
MALPVTALLLPLALLLHAARPEVQLVESGGGLVQPGRSLRLSCTASGFTFTDYYMSWVRQAPGKGLEWVGFIRSKADGYTTEYAASVKGRFTISRDDSKSIAYLQMNSLKTEDTAVYYCTRDAAYYSYYSPEGAMDYWGQGTLVTVSSGGGGSGGGGSGGGGSMADYKDIQMTQSPSSVSASVGDRVTITCRASQNVDSAVAWYQQKPGKAPKLLIYSASYRQSGVPSRFSGSGSGTDFTLTISSLQPEDFATYYCQQYYSTPWTFGQGTKVEIKRTTTPAPRPPTPAPTIASQPLSLRPEACRPAAGGAVHTRGLDFACDIYIWAPLAGTCGVLLLSLVITLYCKRGRKKLLYIFKQPFMRPVQTTQEEDGCSCRFPEEEEGGCELRVKFSRSADAPAYQQGQNQLYNELNLGRREEYDVLDKRRGRDPEMGGKPRRKNPQEGLYNELQKDKMAEAYSEIGMKGERRRGKGHDGLYQGLSTATKDTYDALHMQALPPR

SEQ ID NO: 117 - protein, 499 aa, Artificial sequence
  VH7/VL6
MALPVTALLLPLALLLHAARPEVQLVESGGGLVQPGRSLRLSCTASGFTFTDYYMSWVRQAPGKGLEWVGFIRSKADGYTTEYAASVKGRFTISRDDSKSIAYLQMNSLKTEDTAVYYCTRDAAYYSYYSPEGAMDYWGQGTLVTVSSGGGGSGGGGSGGGGSMADYKDIQMTQSPSSVSASVGDRVTITCRASQNVDSAVAWYQQKPGKAPKLLIYSASYGQSGVPSRFSGSGSGTDFTLTISSLQPEDFATYYCQQYYSTPWTFGQGTKVEIKRTTTPAPRPPTPAPTIASQPLSLRPEACRPAAGGAVHTRGLDFACDIYIWAPLAGTCGVLLLSLVITLYCKRGRKKLLYIFKQPFMRPVQTTQEEDGCSCRFPEEEEGGCELRVKFSRSADAPAYQQGQNQLYNELNLGRREEYDVLDKRRGRDPEMGGKPRRKNPQEGLYNELQKDKMAEAYSEIGMKGERRRGKGHDGLYQGLSTATKDTYDALHMQALPPR

SEQ ID NO: 118 - protein, 531 aa, Artificial sequence
  hKlo43-5 VH1/VL1
MALPVTALLLPLALLLHAARPEVKLVESGGGLVQPGRSLRLSCTASGFTFTDYYMSWVRQAPGKGLEWVGLIRSKADGYTTEYSASVKGRFTISRDDSKSILYLQMNSLKTEDTAVYYCARDAAYYSYYSPEGAMDYWGQGTLVTVSSGGGGSGGGGSGGGGSMADYKDIVMTQSPSSVSASVGDRVTITCRASQNVDSAVAWYQQKPGKAPKALIYSASYRYSGVPSRFSGRGSGTDFTLTISSLQPEDFATYYCQQYYSTPWTFGQGTKVEIKREPKSPDKTHTCPPCPAPPVAGPSVFLFPPKPKDTLMIARTPEVTCVVVDVSHEDPEVKFNWYVDGVEVHNAKTKPREEQYNSTYRVVSVLTVLHQDWLNGKEYKCKVSNKALPAPIEKTISKAKGQPREPQVYTLPPSRDELTKNQVSLTCLVKGFYPSDIAVEWESNGQPENNYKTTPPVLDSDGSFFLYSKLTVDKSRWQQGNVFSCSVMHEALHNHYTQKSLSLSPGKIYIWAPLAGTCGVLLLSLVITLYC

SEQ ID NO: 119 - protein, 531 aa, Artificial sequence
  VH1/VL2
MALPVTALLLPLALLLHAARPEVKLVESGGGLVQPGRSLRLSCTASGFTFTDYYMSWVRQAPGKGLEWVGLIRSKADGYTTEYSASVKGRFTISRDDSKSILYLQMNSLKTEDTAVYYCARDAAYYSYYSPEGAMDYWGQGTLVTVSSGGGGSGGGGSGGGGSMADYKDIQMTQSPSSVSASVGDRVTITCRASQNVDSAVAWYQQKPGKAPKALIYSASYRYSGVPSRFSGRGSGTDFTLTISSLQPEDFATYYCQQYYSTPWTFGQGTKVEIKREPKSPDKTHTCPPCPAPPVAGPSVFLFPPKPKDTLMIARTPEVTCVVVDVSHEDPEVKFNWYVDGVEVHNAKTKPREEQYNSTYRVVSVLTVLHQDWLNGKEYKCKVSNKALPAPIEKTISKAKGQPREPQVYTLPPSRDELTKNQVSLTCLVKGFYPSDIAVEWESNGQPENNYKTTPPVLDSDGSFFLYSKLTVDKSRWQQGNVFSCSVMHEALHNHYTQKSLSLSPGKIYIWAPLAGTCGVLLLSLVITLYC

SEQ ID NO: 120 - protein, 531 aa, Artificial sequence
  VH1/VL3
MALPVTALLLPLALLLHAARPEVKLVESGGGLVQPGRSLRLSCTASGFTFTDYYMSWVRQAPGKGLEWVGLIRSKADGYTTEYSASVKGRFTISRDDSKSILYLQMNSLKTEDTAVYYCARDAAYYSYYSPEGAMDYWGQGTLVTVSSGGGGSGGGGSGGGGSMADYKDIQMTQSPSSVSASVGDRVTITCRASQNVDSAVAWYQQKPGKAPKALIYSASYRYSGVPSRFSGSGSGTDFTLTISSLQPEDFATYYCQQYYSTPWTFGQGTKVEIKREPKSPDKTHTCPPCPAPPVAGPSVFLFPPKPKDTLMIARTPEVTCVVVDVSHEDPEVKFNWYVDGVEVHNAKTKPREEQYNSTYRVVSVLTVLHQDWLNGKEYKCKVSNKALPAPIEKTISKAKGQPREPQVYTLPPSRDELTKNQVSLTCLVKGFYPSDIAVEWESNGQPENNYKTTPPVLDSDGSFFLYSKLTVDKSRWQQGNVFSCSVMHEALHNHYTQKSLSLSPGKIYIWAPLAGTCGVLLLSLVITLYC

SEQ ID NO: 121 - protein, 531 aa, Artificial sequence
  VH1/VL4
MALPVTALLLPLALLLHAARPEVKLVESGGGLVQPGRSLRLSCTASGFTFTDYYMSWVRQAPGKGLEWVGLIRSKADGYTTEYSASVKGRFTISRDDSKSILYLQMNSLKTEDTAVYYCARDAAYYSYYSPEGAMDYWGQGTLVTVSSGGGGSGGGGSGGGGSMADYKDIQMTQSPSSVSASVGDRVTITCRASQNVDSAVAWYQQKPGKAPKLLIYSASYRYSGVPSRFSGSGSGTDFTLTISSLQPEDFATYYCQQYYSTPWTFGQGTKVEIKREPKSPDKTHTCPPCPAPPVAGPSVFLFPPKPKDTLMIARTPEVTCVVVDVSHEDPEVKFNWYVDGVEVHNAKTKPREEQYNSTYRVVSVLTVLHQDWLNGKEYKCKVSNKALPAPIEKTISKAKGQPREPQVYTLPPSRDELTKNQVSLTCLVKGFYPSDIAVEWESNGQPENNYKTTPPVLDSDGSFFLYSKLTVDKSRWQQGNVFSCSVMHEALHNHYTQKSLSLSPGKIYIWAPLAGTCGVLLLSLVITLYC

SEQ ID NO: 122 - protein, 531 aa, Artificial sequence
  VH1/VL5
MALPVTALLLPLALLLHAARPEVKLVESGGGLVQPGRSLRLSCTASGFTFTDYYMSWVRQAPGKGLEWVGLIRSKADGYTTEYSASVKGRFTISRDDSKSILYLQMNSLKTEDTAVYYCARDAAYYSYYSPEGAMDYWGQGTLVTVSSGGGGSGGGGSGGGGSMADYKDIQMTQSPSSVSASVGDRVTITCRASQNVDSAVAWYQQKPGKAPKLLIYSASYRQSGVPSRFSGSGSGTDFTLTISSLQPEDFATYYCQQYYSTPWTFGQGTKVEIKREPKSPDKTHTCPPCPAPPVAGPSVFLFPPKPKDTLMIARTPEVTCVVVDVSHEDPEVKFNWYVDGVEVHNAKTKPREEQYNSTYRVVSVLTVLHQDWLNGKEYKCKVSNKALPAPIEKTISKAKGQPREPQVYTLPPSRDELTKNQVSLTCLVKGFYPSDIAVEWESNGQPENNYKTTPPVLDSDGSFFLYSKLTVDKSRWQQGNVFSCSVMHEALHNHYTQKSLSLSPGKIYIWAPLAGTCGVLLLSLVITLYC

SEQ ID NO: 123 - protein, 531 aa, Artificial sequence
  VH1/VL6
MALPVTALLLPLALLLHAARPEVKLVESGGGLVQPGRSLRLSCTASGFTFTDYYMSWVRQAPGKGLEWVGLIRSKADGYTTEYSASVKGRFTISRDDSKSILYLQMNSLKTEDTAVYYCARDAAYYSYYSPEGAMDYWGQGTLVTVSSGGGGSGGGGSGGGGSMADYKDIQMTQSPSSVSASVGDRVTITCRASQNVDSAVAWYQQKPGKAPKLLIYSASYGQSGVPSRFSGSGSGTDFTLTISSLQPEDFATYYCQQYYSTPWTFGQGTKVEIKREPKSPDKTHTCPPCPAPPVAGPSVFLFPPKPKDTLMIARTPEVTCVVVDVSHEDPEVKFNWYVDGVEVHNAKTKPREEQYNSTYRVVSVLTVLHQDWLNGKEYKCKVSNKALPAPIEKTISKAKGQPREPQVYTLPPSRDELTKNQVSLTCLVKGFYPSDIAVEWESNGQPENNYKTTPPVLDSDGSFFLYSKLTVDKSRWQQGNVFSCSVMHEALHNHYTQKSLSLSPGKIYIWAPLAGTCGVLLLSLVITLYC

SEQ ID NO: 124 - protein, 531 aa, Artificial sequence
  VH2/VL1
MALPVTALLLPLALLLHAARPEVQLVESGGGLVQPGRSLRLSCTASGFTFTDYYMSWVRQAPGKGLEWVGLIRSKADGYTTEYSASVKGRFTISRDDSKSILYLQMNSLKTEDTAVYYCARDAAYYSYYSPEGAMDYWGQGTLVTVSSGGGGSGGGGSGGGGSMADYKDIVMTQSPSSVSASVGDRVTITCRASQNVDSAVAWYQQKPGKAPKALIYSASYRYSGVPSRFSGRGSGTDFTLTISSLQPEDFATYYCQQYYSTPWTFGQGTKVEIKREPKSPDKTHTCPPCPAPPVAGPSVFLFPPKPKDTLMIARTPEVTCVVVDVSHEDPEVKFNWYVDGVEVHNAKTKPREEQYNSTYRVVSVLTVLHQDWLNGKEYKCKVSNKALPAPIEKTISKAKGQPREPQVYTLPPSRDELTKNQVSLTCLVKGFYPSDIAVEWESNGQPENNYKTTPPVLDSDGSFFLYSKLTVDKSRWQQGNVFSCSVMHEALHNHYTQKSLSLSPGKIYIWAPLAGTCGVLLLSLVITLYC

SEQ ID NO: 125 - protein, 531 aa, Artificial sequence
  VH2/VL2
MALPVTALLLPLALLLHAARPEVQLVESGGGLVQPGRSLRLSCTASGFTFTDYYMSWVRQAPGKGLEWVGLIRSKADGYTTEYSASVKGRFTISRDDSKSILYLQMNSLKTEDTAVYYCARDAAYYSYYSPEGAMDYWGQGTLVTVSSGGGGSGGGGSGGGGSMADYKDIQMTQSPSSVSASVGDRVTITCRASQNVDSAVAWYQQKPGKAPKALIYSASYRYSGVPSRFSGRGSGTDFTLTISSLQPEDFATYYCQQYYSTPWTFGQGTKVEIKREPKSPDKTHTCPPCPAPPVAGPSVFLFPPKPKDTLMIARTPEVTCVVVDVSHEDPEVKFNWYVDGVEVHNAKTKPREEQYNSTYRVVSVLTVLHQDWLNGKEYKCKVSNKALPAPIEKTISKAKGQPREPQVYTLPPSRDELTKNQVSLTCLVKGFYPSDIAVEWESNGQPENNYKTTPPVLDSDGSFFLYSKLTVDKSRWQQGNVFSCSVMHEALHNHYTQKSLSLSPGKIYIWAPLAGTCGVLLLSLVITLYC

SEQ ID NO: 126 - protein, 531 aa, Artificial sequence
  VH2/VL3
MALPVTALLLPLALLLHAARPEVQLVESGGGLVQPGRSLRLSCTASGFTFTDYYMSWVRQAPGKGLEWVGLIRSKADGYTTEYSASVKGRFTISRDDSKSILYLQMNSLKTEDTAVYYCARDAAYYSYYSPEGAMDYWGQGTLVTVSSGGGGSGGGGSGGGGSMADYKDIQMTQSPSSVSASVGDRVTITCRASQNVDSAVAWYQQKPGKAPKALIYSASYRYSGVPSRFSGSGSGTDFTLTISSLQPEDFATYYCQQYYSTPWTFGQGTKVEIKREPKSPDKTHTCPPCPAPPVAGPSVFLFPPKPKDTLMIARTPEVTCVVVDVSHEDPEVKFNWYVDGVEVHNAKTKPREEQYNSTYRVVSVLTVLHQDWLNGKEYKCKVSNKALPAPIEKTISKAKGQPREPQVYTLPPSRDELTKNQVSLTCLVKGFYPSDIAVEWESNGQPENNYKTTPPVLDSDGSFFLYSKLTVDKSRWQQGNVFSCSVMHEALHNHYTQKSLSLSPGKIYIWAPLAGTCGVLLLSLVITLYC

SEQ ID NO: 127 - protein, 531 aa, Artificial sequence
  VH2/VL4
MALPVTALLLPLALLLHAARPEVQLVESGGGLVQPGRSLRLSCTASGFTFTDYYMSWVRQAPGKGLEWVGLIRSKADGYTTEYSASVKGRFTISRDDSKSILYLQMNSLKTEDTAVYYCARDAAYYSYYSPEGAMDYWGQGTLVTVSSGGGGSGGGGSGGGGSMADYKDIQMTQSPSSVSASVGDRVTITCRASQNVDSAVAWYQQKPGKAPKLLIYSASYRYSGVPSRFSGSGSGTDFTLTISSLQPEDFATYYCQQYYSTPWTFGQGTKVEIKREPKSPDKTHTCPPCPAPPVAGPSVFLFPPKPKDTLMIARTPEVTCVVVDVSHEDPEVKFNWYVDGVEVHNAKTKPREEQYNSTYRVVSVLTVLHQDWLNGKEYKCKVSNKALPAPIEKTISKAKGQPREPQVYTLPPSRDELTKNQVSLTCLVKGFYPSDIAVEWESNGQPENNYKTTPPVLDSDGSFFLYSKLTVDKSRWQQGNVFSCSVMHEALHNHYTQKSLSLSPGKIYIWAPLAGTCGVLLLSLVITLYC

SEQ ID NO: 128 - protein, 531 aa, Artificial sequence
  VH2/VL5
MALPVTALLLPLALLLHAARPEVQLVESGGGLVQPGRSLRLSCTASGFTFTDYYMSWVRQAPGKGLEWVGLIRSKADGYTTEYSASVKGRFTISRDDSKSILYLQMNSLKTEDTAVYYCARDAAYYSYYSPEGAMDYWGQGTLVTVSSGGGGSGGGGSGGGGSMADYKDIQMTQSPSSVSASVGDRVTITCRASQNVDSAVAWYQQKPGKAPKLLIYSASYRQSGVPSRFSGSGSGTDFTLTISSLQPEDFATYYCQQYYSTPWTFGQGTKVEIKREPKSPDKTHTCPPCPAPPVAGPSVFLFPPKPKDTLMIARTPEVTCVVVDVSHEDPEVKFNWYVDGVEVHNAKTKPREEQYNSTYRVVSVLTVLHQDWLNGKEYKCKVSNKALPAPIEKTISKAKGQPREPQVYTLPPSRDELTKNQVSLTCLVKGFYPSDIAVEWESNGQPENNYKTTPPVLDSDGSFFLYSKLTVDKSRWQQGNVFSCSVMHEALHNHYTQKSLSLSPGKIYIWAPLAGTCGVLLLSLVITLYC

SEQ ID NO: 129 - protein, 531 aa, Artificial sequence
  VH2/VL7
MALPVTALLLPLALLLHAARPEVQLVESGGGLVQPGRSLRLSCTASGFTFTDYYMSWVRQAPGKGLEWVGLIRSKADGYTTEYSASVKGRFTISRDDSKSILYLQMNSLKTEDTAVYYCARDAAYYSYYSPEGAMDYWGQGTLVTVSSGGGGSGGGGSGGGGSMADYKDIQMTQSPSSVSASVGDRVTITCRASQNVDSAVAWYQQKPGKAPKLLIYSASYGQSGVPSRFSGSGSGTDFTLTISSLQPEDFATYYCQQYYSTPWTFGQGTKVEIKREPKSPDKTHTCPPCPAPPVAGPSVFLFPPKPKDTLMIARTPEVTCVVVDVSHEDPEVKFNWYVDGVEVHNAKTKPREEQYNSTYRVVSVLTVLHQDWLNGKEYKCKVSNKALPAPIEKTISKAKGQPREPQVYTLPPSRDELTKNQVSLTCLVKGFYPSDIAVEWESNGQPENNYKTTPPVLDSDGSFFLYSKLTVDKSRWQQGNVFSCSVMHEALHNHYTQKSLSLSPGKIYIWAPLAGTCGVLLLSLVITLYC

SEQ ID NO: 130 - protein, 531 aa, Artificial sequence
  VH3/VL1
MALPVTALLLPLALLLHAARPEVQLVESGGGLVQPGRSLRLSCTASGFTFTDYYMSWVRQAPGKGLEWVGLIRSKADGYTTEYSASVKGRFTISRDDSKSIAYLQMNSLKTEDTAVYYCARDAAYYSYYSPEGAMDYWGQGTLVTVSSGGGGSGGGGSGGGGSMADYKDIVMTQSPSSVSASVGDRVTITCRASQNVDSAVAWYQQKPGKAPKALIYSASYRYSGVPSRFSGRGSGTDFTLTISSLQPEDFATYYCQQYYSTPWTFGQGTKVEIKREPKSPDKTHTCPPCPAPPVAGPSVFLFPPKPKDTLMIARTPEVTCVVVDVSHEDPEVKFNWYVDGVEVHNAKTKPREEQYNSTYRVVSVLTVLHQDWLNGKEYKCKVSNKALPAPIEKTISKAKGQPREPQVYTLPPSRDELTKNQVSLTCLVKGFYPSDIAVEWESNGQPENNYKTTPPVLDSDGSFFLYSKLTVDKSRWQQGNVFSCSVMHEALHNHYTQKSLSLSPGKIYIWAPLAGTCGVLLLSLVITLYC

SEQ ID NO: 131 - protein, 531 aa, Artificial sequence
  VH3/VL2
MALPVTALLLPLALLLHAARPEVQLVESGGGLVQPGRSLRLSCTASGFTFTDYYMSWVRQAPGKGLEWVGLIRSKADGYTTEYSASVKGRFTISRDDSKSIAYLQMNSLKTEDTAVYYCARDAAYYSYYSPEGAMDYWGQGTLVTVSSGGGGSGGGGSGGGGSMADYKDIQMTQSPSSVSASVGDRVTITCRASQNVDSAVAWYQQKPGKAPKALIYSASYRYSGVPSRFSGRGSGTDFTLTISSLQPEDFATYYCQQYYSTPWTFGQGTKVEIKREPKSPDKTHTCPPCPAPPVAGPSVFLFPPKPKDTLMIARTPEVTCVVVDVSHEDPEVKFNWYVDGVEVHNAKTKPREEQYNSTYRVVSVLTVLHQDWLNGKEYKCKVSNKALPAPIEKTISKAKGQPREPQVYTLPPSRDELTKNQVSLTCLVKGFYPSDIAVEWESNGQPENNYKTTPPVLDSDGSFFLYSKLTVDKSRWQQGNVFSCSVMHEALHNHYTQKSLSLSPGKIYIWAPLAGTCGVLLLSLVITLYC

SEQ ID NO: 132 - protein, 531 aa, Artificial sequence
  VH3/VL3
MALPVTALLLPLALLLHAARPEVQLVESGGGLVQPGRSLRLSCTASGFTFTDYYMSWVRQAPGKGLEWVGLIRSKADGYTTEYSASVKGRFTISRDDSKSIAYLQMNSLKTEDTAVYYCARDAAYYSYYSPEGAMDYWGQGTLVTVSSGGGGSGGGGSGGGGSMADYKDIQMTQSPSSVSASVGDRVTITCRASQNVDSAVAWYQQKPGKAPKALIYSASYRYSGVPSRFSGSGSGTDFTLTISSLQPEDFATYYCQQYYSTPWTFGQGTKVEIKREPKSPDKTHTCPPCPAPPVAGPSVFLFPPKPKDTLMIARTPEVTCVVVDVSHEDPEVKFNWYVDGVEVHNAKTKPREEQYNSTYRVVSVLTVLHQDWLNGKEYKCKVSNKALPAPIEKTISKAKGQPREPQVYTLPPSRDELTKNQVSLTCLVKGFYPSDIAVEWESNGQPENNYKTTPPVLDSDGSFFLYSKLTVDKSRWQQGNVFSCSVMHEALHNHYTQKSLSLSPGKIYIWAPLAGTCGVLLLSLVITLYC

SEQ ID NO: 133 - protein, 531 aa, Artificial sequence
  VH3/VL4
MALPVTALLLPLALLLHAARPEVQLVESGGGLVQPGRSLRLSCTASGFTFTDYYMSWVRQAPGKGLEWVGLIRSKADGYTTEYSASVKGRFTISRDDSKSIAYLQMNSLKTEDTAVYYCARDAAYYSYYSPEGAMDYWGQGTLVTVSSGGGGSGGGGSGGGGSMADYKDIQMTQSPSSVSASVGDRVTITCRASQNVDSAVAWYQQKPGKAPKLLIYSASYRYSGVPSRFSGSGSGTDFTLTISSLQPEDFATYYCQQYYSTPWTFGQGTKVEIKREPKSPDKTHTCPPCPAPPVAGPSVFLFPPKPKDTLMIARTPEVTCVVVDVSHEDPEVKFNWYVDGVEVHNAKTKPREEQYNSTYRVVSVLTVLHQDWLNGKEYKCKVSNKALPAPIEKTISKAKGQPREPQVYTLPPSRDELTKNQVSLTCLVKGFYPSDIAVEWESNGQPENNYKTTPPVLDSDGSFFLYSKLTVDKSRWQQGNVFSCSVMHEALHNHYTQKSLSLSPGKIYIWAPLAGTCGVLLLSLVITLYC

SEQ ID NO: 134 - protein, 531 aa, Artificial sequence
  VH3/VL5
MALPVTALLLPLALLLHAARPEVQLVESGGGLVQPGRSLRLSCTASGFTFTDYYMSWVRQAPGKGLEWVGLIRSKADGYTTEYSASVKGRFTISRDDSKSIAYLQMNSLKTEDTAVYYCARDAAYYSYYSPEGAMDYWGQGTLVTVSSGGGGSGGGGSGGGGSMADYKDIQMTQSPSSVSASVGDRVTITCRASQNVDSAVAWYQQKPGKAPKLLIYSASYRQSGVPSRFSGSGSGTDFTLTISSLQPEDFATYYCQQYYSTPWTFGQGTKVEIKREPKSPDKTHTCPPCPAPPVAGPSVFLFPPKPKDTLMIARTPEVTCVVVDVSHEDPEVKFNWYVDGVEVHNAKTKPREEQYNSTYRVVSVLTVLHQDWLNGKEYKCKVSNKALPAPIEKTISKAKGQPREPQVYTLPPSRDELTKNQVSLTCLVKGFYPSDIAVEWESNGQPENNYKTTPPVLDSDGSFFLYSKLTVDKSRWQQGNVFSCSVMHEALHNHYTQKSLSLSPGKIYIWAPLAGTCGVLLLSLVITLYC

SEQ ID NO: 135 - protein, 531 aa, Artificial sequence
  VH3/VL6
MALPVTALLLPLALLLHAARPEVQLVESGGGLVQPGRSLRLSCTASGFTFTDYYMSWVRQAPGKGLEWVGLIRSKADGYTTEYSASVKGRFTISRDDSKSIAYLQMNSLKTEDTAVYYCARDAAYYSYYSPEGAMDYWGQGTLVTVSSGGGGSGGGGSGGGGSMADYKDIQMTQSPSSVSASVGDRVTITCRASQNVDSAVAWYQQKPGKAPKLLIYSASYGQSGVPSRFSGSGSGTDFTLTISSLQPEDFATYYCQQYYSTPWTFGQGTKVEIKREPKSPDKTHTCPPCPAPPVAGPSVFLFPPKPKDTLMIARTPEVTCVVVDVSHEDPEVKFNWYVDGVEVHNAKTKPREEQYNSTYRVVSVLTVLHQDWLNGKEYKCKVSNKALPAPIEKTISKAKGQPREPQVYTLPPSRDELTKNQVSLTCLVKGFYPSDIAVEWESNGQPENNYKTTPPVLDSDGSFFLYSKLTVDKSRWQQGNVFSCSVMHEALHNHYTQKSLSLSPGKIYIWAPLAGTCGVLLLSLVITLYC

SEQ ID NO: 136 - protein, 531 aa, Artificial sequence
  VH4/VL1
MALPVTALLLPLALLLHAARPEVQLVESGGGLVQPGRSLRLSCTASGFTFTDYYMSWVRQAPGKGLEWVGFIRSKADGYTTEYSASVKGRFTISRDDSKSIAYLQMNSLKTEDTAVYYCARDAAYYSYYSPEGAMDYWGQGTLVTVSSGGGGSGGGGSGGGGSMADYKDIVMTQSPSSVSASVGDRVTITCRASQNVDSAVAWYQQKPGKAPKALIYSASYRYSGVPSRFSGRGSGTDFTLTISSLQPEDFATYYCQQYYSTPWTFGQGTKVEIKREPKSPDKTHTCPPCPAPPVAGPSVFLFPPKPKDTLMIARTPEVTCVVVDVSHEDPEVKFNWYVDGVEVHNAKTKPREEQYNSTYRVVSVLTVLHQDWLNGKEYKCKVSNKALPAPIEKTISKAKGQPREPQVYTLPPSRDELTKNQVSLTCLVKGFYPSDIAVEWESNGQPENNYKTTPPVLDSDGSFFLYSKLTVDKSRWQQGNVFSCSVMHEALHNHYTQKSLSLSPGKIYIWAPLAGTCGVLLLSLVITLYC

SEQ ID NO: 137 - protein, 531 aa, Artificial sequence
  VH4/VL2
MALPVTALLLPLALLLHAARPEVQLVESGGGLVQPGRSLRLSCTASGFTFTDYYMSWVRQAPGKGLEWVGFIRSKADGYTTEYSASVKGRFTISRDDSKSIAYLQMNSLKTEDTAVYYCARDAAYYSYYSPEGAMDYWGQGTLVTVSSGGGGSGGGGSGGGGSMADYKDIQMTQSPSSVSASVGDRVTITCRASQNVDSAVAWYQQKPGKAPKALIYSASYRYSGVPSRFSGRGSGTDFTLTISSLQPEDFATYYCQQYYSTPWTFGQGTKVEIKREPKSPDKTHTCPPCPAPPVAGPSVFLFPPKPKDTLMIARTPEVTCVVVDVSHEDPEVKFNWYVDGVEVHNAKTKPREEQYNSTYRVVSVLTVLHQDWLNGKEYKCKVSNKALPAPIEKTISKAKGQPREPQVYTLPPSRDELTKNQVSLTCLVKGFYPSDIAVEWESNGQPENNYKTTPPVLDSDGSFFLYSKLTVDKSRWQQGNVFSCSVMHEALHNHYTQKSLSLSPGKIYIWAPLAGTCGVLLLSLVITLYC

SEQ ID NO: 138 - protein, 531 aa, Artificial sequence
  VH4/VL3
MALPVTALLLPLALLLHAARPEVQLVESGGGLVQPGRSLRLSCTASGFTFTDYYMSWVRQAPGKGLEWVGFIRSKADGYTTEYSASVKGRFTISRDDSKSIAYLQMNSLKTEDTAVYYCARDAAYYSYYSPEGAMDYWGQGTLVTVSSGGGGSGGGGSGGGGSMADYKDIQMTQSPSSVSASVGDRVTITCRASQNVDSAVAWYQQKPGKAPKALIYSASYRYSGVPSRFSGSGSGTDFTLTISSLQPEDFATYYCQQYYSTPWTFGQGTKVEIKREPKSPDKTHTCPPCPAPPVAGPSVFLFPPKPKDTLMIARTPEVTCVVVDVSHEDPEVKFNWYVDGVEVHNAKTKPREEQYNSTYRVVSVLTVLHQDWLNGKEYKCKVSNKALPAPIEKTISKAKGQPREPQVYTLPPSRDELTKNQVSLTCLVKGFYPSDIAVEWESNGQPENNYKTTPPVLDSDGSFFLYSKLTVDKSRWQQGNVFSCSVMHEALHNHYTQKSLSLSPGKIYIWAPLAGTCGVLLLSLVITLYC

SEQ ID NO: 139 - protein, 531 aa, Artificial sequence
  VH4/VL4
MALPVTALLLPLALLLHAARPEVQLVESGGGLVQPGRSLRLSCTASGFTFTDYYMSWVRQAPGKGLEWVGFIRSKADGYTTEYSASVKGRFTISRDDSKSIAYLQMNSLKTEDTAVYYCARDAAYYSYYSPEGAMDYWGQGTLVTVSSGGGGSGGGGSGGGGSMADYKDIQMTQSPSSVSASVGDRVTITCRASQNVDSAVAWYQQKPGKAPKLLIYSASYRYSGVPSRFSGSGSGTDFTLTISSLQPEDFATYYCQQYYSTPWTFGQGTKVEIKREPKSPDKTHTCPPCPAPPVAGPSVFLFPPKPKDTLMIARTPEVTCVVVDVSHEDPEVKFNWYVDGVEVHNAKTKPREEQYNSTYRVVSVLTVLHQDWLNGKEYKCKVSNKALPAPIEKTISKAKGQPREPQVYTLPPSRDELTKNQVSLTCLVKGFYPSDIAVEWESNGQPENNYKTTPPVLDSDGSFFLYSKLTVDKSRWQQGNVFSCSVMHEALHNHYTQKSLSLSPGKIYIWAPLAGTCGVLLLSLVITLYC

SEQ ID NO: 140 - protein, 531 aa, Artificial sequence
  VH4/VL5
MALPVTALLLPLALLLHAARPEVQLVESGGGLVQPGRSLRLSCTASGFTFTDYYMSWVRQAPGKGLEWVGFIRSKADGYTTEYSASVKGRFTISRDDSKSIAYLQMNSLKTEDTAVYYCARDAAYYSYYSPEGAMDYWGQGTLVTVSSGGGGSGGGGSGGGGSMADYKDIQMTQSPSSVSASVGDRVTITCRASQNVDSAVAWYQQKPGKAPKLLIYSASYRQSGVPSRFSGSGSGTDFTLTISSLQPEDFATYYCQQYYSTPWTFGQGTKVEIKREPKSPDKTHTCPPCPAPPVAGPSVFLFPPKPKDTLMIARTPEVTCVVVDVSHEDPEVKFNWYVDGVEVHNAKTKPREEQYNSTYRVVSVLTVLHQDWLNGKEYKCKVSNKALPAPIEKTISKAKGQPREPQVYTLPPSRDELTKNQVSLTCLVKGFYPSDIAVEWESNGQPENNYKTTPPVLDSDGSFFLYSKLTVDKSRWQQGNVFSCSVMHEALHNHYTQKSLSLSPGKIYIWAPLAGTCGVLLLSLVITLYC

SEQ ID NO: 141 - protein, 531 aa, Artificial sequence
  VH4/VL6
MALPVTALLLPLALLLHAARPEVQLVESGGGLVQPGRSLRLSCTASGFTFTDYYMSWVRQAPGKGLEWVGFIRSKADGYTTEYSASVKGRFTISRDDSKSIAYLQMNSLKTEDTAVYYCARDAAYYSYYSPEGAMDYWGQGTLVTVSSGGGGSGGGGSGGGGSMADYKDIQMTQSPSSVSASVGDRVTITCRASQNVDSAVAWYQQKPGKAPKLLIYSASYGQSGVPSRFSGSGSGTDFTLTISSLQPEDFATYYCQQYYSTPWTFGQGTKVEIKREPKSPDKTHTCPPCPAPPVAGPSVFLFPPKPKDTLMIARTPEVTCVVVDVSHEDPEVKFNWYVDGVEVHNAKTKPREEQYNSTYRVVSVLTVLHQDWLNGKEYKCKVSNKALPAPIEKTISKAKGQPREPQVYTLPPSRDELTKNQVSLTCLVKGFYPSDIAVEWESNGQPENNYKTTPPVLDSDGSFFLYSKLTVDKSRWQQGNVFSCSVMHEALHNHYTQKSLSLSPGKIYIWAPLAGTCGVLLLSLVITLYC

SEQ ID NO: 142 - protein, 531 aa, Artificial sequence
  VH5/VL1
MALPVTALLLPLALLLHAARPEVQLVESGGGLVQPGRSLRLSCTASGFTFTDYYMSWVRQAPGKGLEWVGFIRSKADGYTTEYAASVKGRFTISRDDSKSIAYLQMNSLKTEDTAVYYCARDAAYYSYYSPEGAMDYWGQGTLVTVSSGGGGSGGGGSGGGGSMADYKDIVMTQSPSSVSASVGDRVTITCRASQNVDSAVAWYQQKPGKAPKALIYSASYRYSGVPSRFSGRGSGTDFTLTISSLQPEDFATYYCQQYYSTPWTFGQGTKVEIKREPKSPDKTHTCPPCPAPPVAGPSVFLFPPKPKDTLMIARTPEVTCVVVDVSHEDPEVKFNWYVDGVEVHNAKTKPREEQYNSTYRVVSVLTVLHQDWLNGKEYKCKVSNKALPAPIEKTISKAKGQPREPQVYTLPPSRDELTKNQVSLTCLVKGFYPSDIAVEWESNGQPENNYKTTPPVLDSDGSFFLYSKLTVDKSRWQQGNVFSCSVMHEALHNHYTQKSLSLSPGKIYIWAPLAGTCGVLLLSLVITLYC

SEQ ID NO: 143 - protein, 531 aa, Artificial sequence
  VH5/VL2
MALPVTALLLPLALLLHAARPEVQLVESGGGLVQPGRSLRLSCTASGFTFTDYYMSWVRQAPGKGLEWVGFIRSKADGYTTEYAASVKGRFTISRDDSKSIAYLQMNSLKTEDTAVYYCARDAAYYSYYSPEGAMDYWGQGTLVTVSSGGGGSGGGGSGGGGSMADYKDIQMTQSPSSVSASVGDRVTITCRASQNVDSAVAWYQQKPGKAPKALIYSASYRYSGVPSRFSGRGSGTDFTLTISSLQPEDFATYYCQQYYSTPWTFGQGTKVEIKREPKSPDKTHTCPPCPAPPVAGPSVFLFPPKPKDTLMIARTPEVTCVVVDVSHEDPEVKFNWYVDGVEVHNAKTKPREEQYNSTYRVVSVLTVLHQDWLNGKEYKCKVSNKALPAPIEKTISKAKGQPREPQVYTLPPSRDELTKNQVSLTCLVKGFYPSDIAVEWESNGQPENNYKTTPPVLDSDGSFFLYSKLTVDKSRWQQGNVFSCSVMHEALHNHYTQKSLSLSPGKIYIWAPLAGTCGVLLLSLVITLYC

SEQ ID NO: 144 - protein, 531 aa, Artificial sequence
  VH5/VL3
MALPVTALLLPLALLLHAARPEVQLVESGGGLVQPGRSLRLSCTASGFTFTDYYMSWVRQAPGKGLEWVGFIRSKADGYTTEYAASVKGRFTISRDDSKSIAYLQMNSLKTEDTAVYYCARDAAYYSYYSPEGAMDYWGQGTLVTVSSGGGGSGGGGSGGGGSMADYKDIQMTQSPSSVSASVGDRVTITCRASQNVDSAVAWYQQKPGKAPKALIYSASYRYSGVPSRFSGSGSGTDFTLTISSLQPEDFATYYCQQYYSTPWTFGQGTKVEIKREPKSPDKTHTCPPCPAPPVAGPSVFLFPPKPKDTLMIARTPEVTCVVVDVSHEDPEVKFNWYVDGVEVHNAKTKPREEQYNSTYRVVSVLTVLHQDWLNGKEYKCKVSNKALPAPIEKTISKAKGQPREPQVYTLPPSRDELTKNQVSLTCLVKGFYPSDIAVEWESNGQPENNYKTTPPVLDSDGSFFLYSKLTVDKSRWQQGNVFSCSVMHEALHNHYTQKSLSLSPGKIYIWAPLAGTCGVLLLSLVITLYC

SEQ ID NO: 145 - protein, 531 aa, Artificial sequence
  VH5/VL4
MALPVTALLLPLALLLHAARPEVQLVESGGGLVQPGRSLRLSCTASGFTFTDYYMSWVRQAPGKGLEWVGFIRSKADGYTTEYAASVKGRFTISRDDSKSIAYLQMNSLKTEDTAVYYCARDAAYYSYYSPEGAMDYWGQGTLVTVSSGGGGSGGGGSGGGGSMADYKDIQMTQSPSSVSASVGDRVTITCRASQNVDSAVAWYQQKPGKAPKLLIYSASYRYSGVPSRFSGSGSGTDFTLTISSLQPEDFATYYCQQYYSTPWTFGQGTKVEIKREPKSPDKTHTCPPCPAPPVAGPSVFLFPPKPKDTLMIARTPEVTCVVVDVSHEDPEVKFNWYVDGVEVHNAKTKPREEQYNSTYRVVSVLTVLHQDWLNGKEYKCKVSNKALPAPIEKTISKAKGQPREPQVYTLPPSRDELTKNQVSLTCLVKGFYPSDIAVEWESNGQPENNYKTTPPVLDSDGSFFLYSKLTVDKSRWQQGNVFSCSVMHEALHNHYTQKSLSLSPGKIYIWAPLAGTCGVLLLSLVITLYC

SEQ ID NO: 146 - protein, 531 aa, Artificial sequence
  VH5/VL5
MALPVTALLLPLALLLHAARPEVQLVESGGGLVQPGRSLRLSCTASGFTFTDYYMSWVRQAPGKGLEWVGFIRSKADGYTTEYAASVKGRFTISRDDSKSIAYLQMNSLKTEDTAVYYCARDAAYYSYYSPEGAMDYWGQGTLVTVSSGGGGSGGGGSGGGGSMADYKDIQMTQSPSSVSASVGDRVTITCRASQNVDSAVAWYQQKPGKAPKLLIYSASYRQSGVPSRFSGSGSGTDFTLTISSLQPEDFATYYCQQYYSTPWTFGQGTKVEIKREPKSPDKTHTCPPCPAPPVAGPSVFLFPPKPKDTLMIARTPEVTCVVVDVSHEDPEVKFNWYVDGVEVHNAKTKPREEQYNSTYRVVSVLTVLHQDWLNGKEYKCKVSNKALPAPIEKTISKAKGQPREPQVYTLPPSRDELTKNQVSLTCLVKGFYPSDIAVEWESNGQPENNYKTTPPVLDSDGSFFLYSKLTVDKSRWQQGNVFSCSVMHEALHNHYTQKSLSLSPGKIYIWAPLAGTCGVLLLSLVITLYC

SEQ ID NO: 147 - protein, 531 aa, Artificial sequence
  VH5/VL6
MALPVTALLLPLALLLHAARPEVQLVESGGGLVQPGRSLRLSCTASGFTFTDYYMSWVRQAPGKGLEWVGFIRSKADGYTTEYAASVKGRFTISRDDSKSIAYLQMNSLKTEDTAVYYCARDAAYYSYYSPEGAMDYWGQGTLVTVSSGGGGSGGGGSGGGGSMADYKDIQMTQSPSSVSASVGDRVTITCRASQNVDSAVAWYQQKPGKAPKLLIYSASYGQSGVPSRFSGSGSGTDFTLTISSLQPEDFATYYCQQYYSTPWTFGQGTKVEIKREPKSPDKTHTCPPCPAPPVAGPSVFLFPPKPKDTLMIARTPEVTCVVVDVSHEDPEVKFNWYVDGVEVHNAKTKPREEQYNSTYRVVSVLTVLHQDWLNGKEYKCKVSNKALPAPIEKTISKAKGQPREPQVYTLPPSRDELTKNQVSLTCLVKGFYPSDIAVEWESNGQPENNYKTTPPVLDSDGSFFLYSKLTVDKSRWQQGNVFSCSVMHEALHNHYTQKSLSLSPGKIYIWAPLAGTCGVLLLSLVITLYC

SEQ ID NO: 148 - protein, 531 aa, Artificial sequence
  VH6/VL1
MALPVTALLLPLALLLHAARPEVQLVESGGGLVQPGRSLRLSCTASGFTFTDYYMSWVRQAPGKGLEWVGLIRSKADGYTTEYAASVKGRFTISRDDSKSIAYLQMNSLKTEDTAVYYCARDAAYYSYYSPEGAMDYWGQGTLVTVSSGGGGSGGGGSGGGGSMADYKDIVMTQSPSSVSASVGDRVTITCRASQNVDSAVAWYQQKPGKAPKALIYSASYRYSGVPSRFSGRGSGTDFTLTISSLQPEDFATYYCQQYYSTPWTFGQGTKVEIKREPKSPDKTHTCPPCPAPPVAGPSVFLFPPKPKDTLMIARTPEVTCVVVDVSHEDPEVKFNWYVDGVEVHNAKTKPREEQYNSTYRVVSVLTVLHQDWLNGKEYKCKVSNKALPAPIEKTISKAKGQPREPQVYTLPPSRDELTKNQVSLTCLVKGFYPSDIAVEWESNGQPENNYKTTPPVLDSDGSFFLYSKLTVDKSRWQQGNVFSCSVMHEALHNHYTQKSLSLSPGKIYIWAPLAGTCGVLLLSLVITLYC

SEQ ID NO: 149 - protein, 531 aa, Artificial sequence
  VH6/VL2
MALPVTALLLPLALLLHAARPEVQLVESGGGLVQPGRSLRLSCTASGFTFTDYYMSWVRQAPGKGLEWVGLIRSKADGYTTEYAASVKGRFTISRDDSKSIAYLQMNSLKTEDTAVYYCARDAAYYSYYSPEGAMDYWGQGTLVTVSSGGGGSGGGGSGGGGSMADYKDIQMTQSPSSVSASVGDRVTITCRASQNVDSAVAWYQQKPGKAPKALIYSASYRYSGVPSRFSGRGSGTDFTLTISSLQPEDFATYYCQQYYSTPWTFGQGTKVEIKREPKSPDKTHTCPPCPAPPVAGPSVFLFPPKPKDTLMIARTPEVTCVVVDVSHEDPEVKFNWYVDGVEVHNAKTKPREEQYNSTYRVVSVLTVLHQDWLNGKEYKCKVSNKALPAPIEKTISKAKGQPREPQVYTLPPSRDELTKNQVSLTCLVKGFYPSDIAVEWESNGQPENNYKTTPPVLDSDGSFFLYSKLTVDKSRWQQGNVFSCSVMHEALHNHYTQKSLSLSPGKIYIWAPLAGTCGVLLLSLVITLYC

SEQ ID NO: 150 - protein, 531 aa, Artificial sequence
  VH6/VL3
MALPVTALLLPLALLLHAARPEVQLVESGGGLVQPGRSLRLSCTASGFTFTDYYMSWVRQAPGKGLEWVGLIRSKADGYTTEYAASVKGRFTISRDDSKSIAYLQMNSLKTEDTAVYYCARDAAYYSYYSPEGAMDYWGQGTLVTVSSGGGGSGGGGSGGGGSMADYKDIQMTQSPSSVSASVGDRVTITCRASQNVDSAVAWYQQKPGKAPKALIYSASYRYSGVPSRFSGSGSGTDFTLTISSLQPEDFATYYCQQYYSTPWTFGQGTKVEIKREPKSPDKTHTCPPCPAPPVAGPSVFLFPPKPKDTLMIARTPEVTCVVVDVSHEDPEVKFNWYVDGVEVHNAKTKPREEQYNSTYRVVSVLTVLHQDWLNGKEYKCKVSNKALPAPIEKTISKAKGQPREPQVYTLPPSRDELTKNQVSLTCLVKGFYPSDIAVEWESNGQPENNYKTTPPVLDSDGSFFLYSKLTVDKSRWQQGNVFSCSVMHEALHNHYTQKSLSLSPGKIYIWAPLAGTCGVLLLSLVITLYC

SEQ ID NO: 151 - protein, 531 aa, Artificial sequence
  VH6/VL4
MALPVTALLLPLALLLHAARPEVQLVESGGGLVQPGRSLRLSCTASGFTFTDYYMSWVRQAPGKGLEWVGLIRSKADGYTTEYAASVKGRFTISRDDSKSIAYLQMNSLKTEDTAVYYCARDAAYYSYYSPEGAMDYWGQGTLVTVSSGGGGSGGGGSGGGGSMADYKDIQMTQSPSSVSASVGDRVTITCRASQNVDSAVAWYQQKPGKAPKLLIYSASYRYSGVPSRFSGSGSGTDFTLTISSLQPEDFATYYCQQYYSTPWTFGQGTKVEIKREPKSPDKTHTCPPCPAPPVAGPSVFLFPPKPKDTLMIARTPEVTCVVVDVSHEDPEVKFNWYVDGVEVHNAKTKPREEQYNSTYRVVSVLTVLHQDWLNGKEYKCKVSNKALPAPIEKTISKAKGQPREPQVYTLPPSRDELTKNQVSLTCLVKGFYPSDIAVEWESNGQPENNYKTTPPVLDSDGSFFLYSKLTVDKSRWQQGNVFSCSVMHEALHNHYTQKSLSLSPGKIYIWAPLAGTCGVLLLSLVITLYC

SEQ ID NO: 152 - protein, 531 aa, Artificial sequence
  VH6/VL5
MALPVTALLLPLALLLHAARPEVQLVESGGGLVQPGRSLRLSCTASGFTFTDYYMSWVRQAPGKGLEWVGLIRSKADGYTTEYAASVKGRFTISRDDSKSIAYLQMNSLKTEDTAVYYCARDAAYYSYYSPEGAMDYWGQGTLVTVSSGGGGSGGGGSGGGGSMADYKDIQMTQSPSSVSASVGDRVTITCRASQNVDSAVAWYQQKPGKAPKLLIYSASYRQSGVPSRFSGSGSGTDFTLTISSLQPEDFATYYCQQYYSTPWTFGQGTKVEIKREPKSPDKTHTCPPCPAPPVAGPSVFLFPPKPKDTLMIARTPEVTCVVVDVSHEDPEVKFNWYVDGVEVHNAKTKPREEQYNSTYRVVSVLTVLHQDWLNGKEYKCKVSNKALPAPIEKTISKAKGQPREPQVYTLPPSRDELTKNQVSLTCLVKGFYPSDIAVEWESNGQPENNYKTTPPVLDSDGSFFLYSKLTVDKSRWQQGNVFSCSVMHEALHNHYTQKSLSLSPGKIYIWAPLAGTCGVLLLSLVITLYC

SEQ ID NO: 153 - protein, 531 aa, Artificial sequence
  VH6/VL6
MALPVTALLLPLALLLHAARPEVQLVESGGGLVQPGRSLRLSCTASGFTFTDYYMSWVRQAPGKGLEWVGLIRSKADGYTTEYAASVKGRFTISRDDSKSIAYLQMNSLKTEDTAVYYCARDAAYYSYYSPEGAMDYWGQGTLVTVSSGGGGSGGGGSGGGGSMADYKDIQMTQSPSSVSASVGDRVTITCRASQNVDSAVAWYQQKPGKAPKLLIYSASYGQSGVPSRFSGSGSGTDFTLTISSLQPEDFATYYCQQYYSTPWTFGQGTKVEIKREPKSPDKTHTCPPCPAPPVAGPSVFLFPPKPKDTLMIARTPEVTCVVVDVSHEDPEVKFNWYVDGVEVHNAKTKPREEQYNSTYRVVSVLTVLHQDWLNGKEYKCKVSNKALPAPIEKTISKAKGQPREPQVYTLPPSRDELTKNQVSLTCLVKGFYPSDIAVEWESNGQPENNYKTTPPVLDSDGSFFLYSKLTVDKSRWQQGNVFSCSVMHEALHNHYTQKSLSLSPGKIYIWAPLAGTCGVLLLSLVITLYC

SEQ ID NO: 154 - protein, 531 aa, Artificial sequence
  VH7/VL1
MALPVTALLLPLALLLHAARPEVQLVESGGGLVQPGRSLRLSCTASGFTFTDYYMSWVRQAPGKGLEWVGFIRSKADGYTTEYAASVKGRFTISRDDSKSIAYLQMNSLKTEDTAVYYCTRDAAYYSYYSPEGAMDYWGQGTLVTVSSGGGGSGGGGSGGGGSMADYKDIVMTQSPSSVSASVGDRVTITCRASQNVDSAVAWYQQKPGKAPKALIYSASYRYSGVPSRFSGRGSGTDFTLTISSLQPEDFATYYCQQYYSTPWTFGQGTKVEIKREPKSPDKTHTCPPCPAPPVAGPSVFLFPPKPKDTLMIARTPEVTCVVVDVSHEDPEVKFNWYVDGVEVHNAKTKPREEQYNSTYRVVSVLTVLHQDWLNGKEYKCKVSNKALPAPIEKTISKAKGQPREPQVYTLPPSRDELTKNQVSLTCLVKGFYPSDIAVEWESNGQPENNYKTTPPVLDSDGSFFLYSKLTVDKSRWQQGNVFSCSVMHEALHNHYTQKSLSLSPGKIYIWAPLAGTCGVLLLSLVITLYC

SEQ ID NO: 155 - protein, 531 aa, Artificial sequence
  VH7/VL2
MALPVTALLLPLALLLHAARPEVQLVESGGGLVQPGRSLRLSCTASGFTFTDYYMSWVRQAPGKGLEWVGFIRSKADGYTTEYAASVKGRFTISRDDSKSIAYLQMNSLKTEDTAVYYCTRDAAYYSYYSPEGAMDYWGQGTLVTVSSGGGGSGGGGSGGGGSMADYKDIQMTQSPSSVSASVGDRVTITCRASQNVDSAVAWYQQKPGKAPKALIYSASYRYSGVPSRFSGRGSGTDFTLTISSLQPEDFATYYCQQYYSTPWTFGQGTKVEIKREPKSPDKTHTCPPCPAPPVAGPSVFLFPPKPKDTLMIARTPEVTCVVVDVSHEDPEVKFNWYVDGVEVHNAKTKPREEQYNSTYRVVSVLTVLHQDWLNGKEYKCKVSNKALPAPIEKTISKAKGQPREPQVYTLPPSRDELTKNQVSLTCLVKGFYPSDIAVEWESNGQPENNYKTTPPVLDSDGSFFLYSKLTVDKSRWQQGNVFSCSVMHEALHNHYTQKSLSLSPGKIYIWAPLAGTCGVLLLSLVITLYC

SEQ ID NO: 156 - protein, 531 aa, Artificial sequence
  VH7/VL3
MALPVTALLLPLALLLHAARPEVQLVESGGGLVQPGRSLRLSCTASGFTFTDYYMSWVRQAPGKGLEWVGFIRSKADGYTTEYAASVKGRFTISRDDSKSIAYLQMNSLKTEDTAVYYCTRDAAYYSYYSPEGAMDYWGQGTLVTVSSGGGGSGGGGSGGGGSMADYKDIQMTQSPSSVSASVGDRVTITCRASQNVDSAVAWYQQKPGKAPKALIYSASYRYSGVPSRFSGSGSGTDFTLTISSLQPEDFATYYCQQYYSTPWTFGQGTKVEIKREPKSPDKTHTCPPCPAPPVAGPSVFLFPPKPKDTLMIARTPEVTCVVVDVSHEDPEVKFNWYVDGVEVHNAKTKPREEQYNSTYRVVSVLTVLHQDWLNGKEYKCKVSNKALPAPIEKTISKAKGQPREPQVYTLPPSRDELTKNQVSLTCLVKGFYPSDIAVEWESNGQPENNYKTTPPVLDSDGSFFLYSKLTVDKSRWQQGNVFSCSVMHEALHNHYTQKSLSLSPGKIYIWAPLAGTCGVLLLSLVITLYC

SEQ ID NO: 157 - protein, 531 aa, Artificial sequence
  VH7/VL4
MALPVTALLLPLALLLHAARPEVQLVESGGGLVQPGRSLRLSCTASGFTFTDYYMSWVRQAPGKGLEWVGFIRSKADGYTTEYAASVKGRFTISRDDSKSIAYLQMNSLKTEDTAVYYCTRDAAYYSYYSPEGAMDYWGQGTLVTVSSGGGGSGGGGSGGGGSMADYKDIQMTQSPSSVSASVGDRVTITCRASQNVDSAVAWYQQKPGKAPKLLIYSASYRYSGVPSRFSGSGSGTDFTLTISSLQPEDFATYYCQQYYSTPWTFGQGTKVEIKREPKSPDKTHTCPPCPAPPVAGPSVFLFPPKPKDTLMIARTPEVTCVVVDVSHEDPEVKFNWYVDGVEVHNAKTKPREEQYNSTYRVVSVLTVLHQDWLNGKEYKCKVSNKALPAPIEKTISKAKGQPREPQVYTLPPSRDELTKNQVSLTCLVKGFYPSDIAVEWESNGQPENNYKTTPPVLDSDGSFFLYSKLTVDKSRWQQGNVFSCSVMHEALHNHYTQKSLSLSPGKIYIWAPLAGTCGVLLLSLVITLYC

SEQ ID NO: 158 - protein, 531 aa, Artificial sequence
  VH7/VL5
MALPVTALLLPLALLLHAARPEVQLVESGGGLVQPGRSLRLSCTASGFTFTDYYMSWVRQAPGKGLEWVGFIRSKADGYTTEYAASVKGRFTISRDDSKSIAYLQMNSLKTEDTAVYYCTRDAAYYSYYSPEGAMDYWGQGTLVTVSSGGGGSGGGGSGGGGSMADYKDIQMTQSPSSVSASVGDRVTITCRASQNVDSAVAWYQQKPGKAPKLLIYSASYRQSGVPSRFSGSGSGTDFTLTISSLQPEDFATYYCQQYYSTPWTFGQGTKVEIKREPKSPDKTHTCPPCPAPPVAGPSVFLFPPKPKDTLMIARTPEVTCVVVDVSHEDPEVKFNWYVDGVEVHNAKTKPREEQYNSTYRVVSVLTVLHQDWLNGKEYKCKVSNKALPAPIEKTISKAKGQPREPQVYTLPPSRDELTKNQVSLTCLVKGFYPSDIAVEWESNGQPENNYKTTPPVLDSDGSFFLYSKLTVDKSRWQQGNVFSCSVMHEALHNHYTQKSLSLSPGKIYIWAPLAGTCGVLLLSLVITLYC

SEQ ID NO: 159 - protein, 531 aa, Artificial sequence
  VH7/VL6
MALPVTALLLPLALLLHAARPEVQLVESGGGLVQPGRSLRLSCTASGFTFTDYYMSWVRQAPGKGLEWVGFIRSKADGYTTEYAASVKGRFTISRDDSKSIAYLQMNSLKTEDTAVYYCTRDAAYYSYYSPEGAMDYWGQGTLVTVSSGGGGSGGGGSGGGGSMADYKDIQMTQSPSSVSASVGDRVTITCRASQNVDSAVAWYQQKPGKAPKLLIYSASYGQSGVPSRFSGSGSGTDFTLTISSLQPEDFATYYCQQYYSTPWTFGQGTKVEIKREPKSPDKTHTCPPCPAPPVAGPSVFLFPPKPKDTLMIARTPEVTCVVVDVSHEDPEVKFNWYVDGVEVHNAKTKPREEQYNSTYRVVSVLTVLHQDWLNGKEYKCKVSNKALPAPIEKTISKAKGQPREPQVYTLPPSRDELTKNQVSLTCLVKGFYPSDIAVEWESNGQPENNYKTTPPVLDSDGSFFLYSKLTVDKSRWQQGNVFSCSVMHEALHNHYTQKSLSLSPGKIYIWAPLAGTCGVLLLSLVITLYC

SEQ ID NO: 160 - protein, 526 aa, Artificial sequence
  hKlo43-3 -2xCD20 hinge CD8
MALPVTALLLPLALLLHAARPEVKLVESGGGLVQPGGSLSLSCAASGFTFTDYYMSWVRQPPGKALEWLALIRSKADGYTTEYSASVKGRFTLSRDDSQSILYLQMNALRPEDSATYYCARDAAYYSYYSPEGAMDYWGQGTSVTVSSGGGGSGGGGSGGGGSMADYKDIVMTQSHKFMSTSVGDRVNITCKASQNVDSAVAWYQQKPGQSPKALIYSASYRYSGVPDRFTGRGSGTDFTLTISSVQAEDLAVYYCQQYYSTPWTFGGGTKLEIKRGSGGGGSCPYSNPSLCSGGGGSCPYSNPSLCSGGGGSAPTIASQPLSLRPEACRPAAGGAVHTRGLDFACDIYIWAPLAGTCGVLLLSLVITLYCRRGRKKLLYIFKQPFMRPVQTTQEEDGCSCRFPEEEEGGCELRVKFSRSADAPAYQQGQNQLYNELNLGRREEYDVLDKRRGRDPEMGGKPRRKNPQEGLYNELQKDKMAEAYSEIGMKGERRRGKGHDGLYQGLSTATKDTYDALHMQALPPRE

SEQ ID NO: 161 - protein, 9 aa, Artificial sequence
  CD20 mimotope
CPYSNPSLC

SEQ ID NO: 162 - protein, 24 aa, Artificial sequence
  Palivizumab
NSELLSLINDMPITNDQKKLMSNN

SEQ ID NO: 163 - protein, 12 aa, Artificial sequence
  Cetuximab 1
CQFDLSTRRLKC

SEQ ID NO: 164 - protein, 12 aa, Artificial sequence
  Cetuximab 2
CQYNLSSRALKC

SEQ ID NO: 165 - protein, 12 aa, Artificial sequence
  Cetuximab 3
CVWQRWQKSYVC

SEQ ID NO: 166 - protein, 12 aa, Artificial sequence
  Cetuximab 4
CMWDRFSRWYKC

SEQ ID NO: 167 - protein, 25 aa, Artificial sequence
  Nivolumab 1
SFVLNWYRMSPSNQTDKLAAFPEDR

SEQ ID NO: 168 - protein, 19 aa, Artificial sequence
  Nivolumab 2
SGTYLCGAISLAPKAQIKE

SEQ ID NO: 169 - protein, 24 aa, Artificial sequence
  QBEND-10
ELPTQGTFSNVSTNVSPAKPTTTA

SEQ ID NO: 170 - protein, 12 aa, Artificial sequence
  Alemtuzumab
GQNDTSQTSSPS

SEQ ID NO: 171 - protein, 37 aa, Artificial sequence
  Hinge CD20
GSGGGGSCPYSNPSLCSGGGGSCPYSNPSLCSGGGGS

SEQ ID NO: 172 - protein, 473 aa, Artificial sequence
  huK43-VH10/VL1 V3
EVQLVESGGGLVQPGRSLRLSCTASGFTFTDYYMSWVRQAPGKGLEWVGLIRSKADGYTTEYAASVKGRFTISRDDSQSIAYLQMNSLKTEDTAVYYCARDAAYYSYYSPEGAMDYWGQGTLVTVSSGGGGSGGGGSGGGGSDIVMTQSPSSVSASVGDRVTITCRASQNVDSAVAWYQQKPGKAPKALIYSASYRYSGVPSRFSGRGSGTDFTLTISSLQPEDFATYYCQQYYSTPWTFGQGTKVEIKRTTTPAPRPPTPAPTIASQPLSLRPEACRPAAGGAVHTRGLDFACDIYIWAPLAGTCGVLLLSLVITLYCKRGRKKLLYIFKQPFMRPVQTTQEEDGCSCRFPEEEEGGCELRVKFSRSADAPAYQQGQNQLYNELNLGRREEYDVLDKRRGRDPEMGGKPRRKNPQEGLYNELQKDKMAEAYSEIGMKGERRRGKGHDGLYQGLSTATKDTYDALHMQALPPR

SEQ ID NO: 173 - protein, 473 aa, Artificial sequence
  huK43-VH9/VL6 V3
EVQLVESGGGLVQPGRSLRLSCTASGFTFTDYYMSWVRQAPGKGLEWVGLIRSKADGYTTEYSASVKGRFTISRDDSQSIAYLQMNSLKTEDTAVYYCARDAAYYSYYSPEGAMDYWGQGTLVTVSSGGGGSGGGGSGGGGSDIQMTQSPSSVSASVGDRVTITCKASQNVDSAVAWYQQKPGKAPKLLIYSASYRYSGVPSRFSGSGSGTDFTLTISSLQPEDFATYYCQQYYSTPWTFGQGTKVEIKRTTTPAPRPPTPAPTIASQPLSLRPEACRPAAGGAVHTRGLDFACDIYIWAPLAGTCGVLLLSLVITLYCKRGRKKLLYIFKQPFMRPVQTTQEEDGCSCRFPEEEEGGCELRVKFSRSADAPAYQQGQNQLYNELNLGRREEYDVLDKRRGRDPEMGGKPRRKNPQEGLYNELQKDKMAEAYSEIGMKGERRRGKGHDGLYQGLSTATKDTYDALHMQALPPR

SEQ ID NO: 174 - protein, 473 aa, Artificial sequence
  huK43-VH10/VL3 V3
EVQLVESGGGLVQPGRSLRLSCTASGFTFTDYYMSWVRQAPGKGLEWVGLIRSKADGYTTEYAASVKGRFTISRDDSQSIAYLQMNSLKTEDTAVYYCARDAAYYSYYSPEGAMDYWGQGTLVTVSSGGGGSGGGGSGGGGSDIQMTQSPSSVSASVGDRVTITCRASQNVDSAVAWYQQKPGKAPKALIYSASYRYSGVPSRFSGSGSGTDFTLTISSLQPEDFATYYCQQYYSTPWTFGQGTKVEIKRTTTPAPRPPTPAPTIASQPLSLRPEACRPAAGGAVHTRGLDFACDIYIWAPLAGTCGVLLLSLVITLYCKRGRKKLLYIFKQPFMRPVQTTQEEDGCSCRFPEEEEGGCELRVKFSRSADAPAYQQGQNQLYNELNLGRREEYDVLDKRRGRDPEMGGKPRRKNPQEGLYNELQKDKMAEAYSEIGMKGERRRGKGHDGLYQGLSTATKDTYDALHMQALPPR

SEQ ID NO: 175 - protein, 473 aa, Artificial sequence
  huK43-VH9/VL8 V3
EVQLVESGGGLVQPGRSLRLSCTASGFTFTDYYMSWVRQAPGKGLEWVGLIRSKADGYTTEYSASVKGRFTISRDDSQSIAYLQMNSLKTEDTAVYYCARDAAYYSYYSPEGAMDYWGQGTLVTVSSGGGGSGGGGSGGGGSDIQMTQSPSSVSASVGDRVTITCRASQNVDSAVAWYQQKPGKAPKALIYSASYRYSGVPSRFSGSGSGTDFTLTISSLQPEDLATYYCQQYYSTPWTFGQGTKVEIKRTTTPAPRPPTPAPTIASQPLSLRPEACRPAAGGAVHTRGLDFACDIYIWAPLAGTCGVLLLSLVITLYCKRGRKKLLYIFKQPFMRPVQTTQEEDGCSCRFPEEEEGGCELRVKFSRSADAPAYQQGQNQLYNELNLGRREEYDVLDKRRGRDPEMGGKPRRKNPQEGLYNELQKDKMAEAYSEIGMKGERRRGKGHDGLYQGLSTATKDTYDALHMQALPPR

SEQ ID NO: 176 - protein, 473 aa, Artificial sequence
  huK43-VH2/VL3 V3
EVQLVESGGGLVQPGRSLRLSCTASGFTFTDYYMSWVRQAPGKGLEWVGLIRSKADGYTTEYSASVKGRFTISRDDSKSILYLQMNSLKTEDTAVYYCARDAAYYSYYSPEGAMDYWGQGTLVTVSSGGGGSGGGGSGGGGSDIQMTQSPSSVSASVGDRVTITCRASQNVDSAVAWYQQKPGKAPKALIYSASYRYSGVPSRFSGSGSGTDFTLTISSLQPEDFATYYCQQYYSTPWTFGQGTKVEIKRTTTPAPRPPTPAPTIASQPLSLRPEACRPAAGGAVHTRGLDFACDIYIWAPLAGTCGVLLLSLVITLYCKRGRKKLLYIFKQPFMRPVQTTQEEDGCSCRFPEEEEGGCELRVKFSRSADAPAYQQGQNQLYNELNLGRREEYDVLDKRRGRDPEMGGKPRRKNPQEGLYNELQKDKMAEAYSEIGMKGERRRGKGHDGLYQGLSTATKDTYDALHMQALPPR

SEQ ID NO: 177 - protein, 473 aa, Artificial sequence
  huK43-VH10/VL9 V3
EVQLVESGGGLVQPGRSLRLSCTASGFTFTDYYMSWVRQAPGKGLEWVGLIRSKADGYTTEYAASVKGRFTISRDDSQSIAYLQMNSLKTEDTAVYYCARDAAYYSYYSPEGAMDYWGQGTLVTVSSGGGGSGGGGSGGGGSDIQMTQSPSSVSASVGDRVTITCKASQNVDSAVAWYQQKPGKAPKALIYSASYRYSGVPDRFSGSGSGTDFTLTISSLQPEDLATYYCQQYYSTPWTFGQGTKVEIKRTTTPAPRPPTPAPTIASQPLSLRPEACRPAAGGAVHTRGLDFACDIYIWAPLAGTCGVLLLSLVITLYCKRGRKKLLYIFKQPFMRPVQTTQEEDGCSCRFPEEEEGGCELRVKFSRSADAPAYQQGQNQLYNELNLGRREEYDVLDKRRGRDPEMGGKPRRKNPQEGLYNELQKDKMAEAYSEIGMKGERRRGKGHDGLYQGLSTATKDTYDALHMQALPPR

SEQ ID NO: 178 - protein, 473 aa, Artificial sequence
  huK43-VH9/VL3 V3
EVQLVESGGGLVQPGRSLRLSCTASGFTFTDYYMSWVRQAPGKGLEWVGLIRSKADGYTTEYSASVKGRFTISRDDSQSIAYLQMNSLKTEDTAVYYCARDAAYYSYYSPEGAMDYWGQGTLVTVSSGGGGSGGGGSGGGGSDIQMTQSPSSVSASVGDRVTITCRASQNVDSAVAWYQQKPGKAPKALIYSASYRYSGVPSRFSGSGSGTDFTLTISSLQPEDFATYYCQQYYSTPWTFGQGTKVEIKRTTTPAPRPPTPAPTIASQPLSLRPEACRPAAGGAVHTRGLDFACDIYIWAPLAGTCGVLLLSLVITLYCKRGRKKLLYIFKQPFMRPVQTTQEEDGCSCRFPEEEEGGCELRVKFSRSADAPAYQQGQNQLYNELNLGRREEYDVLDKRRGRDPEMGGKPRRKNPQEGLYNELQKDKMAEAYSEIGMKGERRRGKGHDGLYQGLSTATKDTYDALHMQALPPR

SEQ ID NO: 179 - protein, 473 aa, Artificial sequence
  huKlon43 VH2/VL1 V3
EVQLVESGGGLVQPGRSLRLSCTASGFTFTDYYMSWVRQAPGKGLEWVGLIRSKADGYTTEYSASVKGRFTISRDDSKSILYLQMNSLKTEDTAVYYCARDAAYYSYYSPEGAMDYWGQGTLVTVSSGGGGSGGGGSGGGGSDIVMTQSPSSVSASVGDRVTITCRASQNVDSAVAWYQQKPGKAPKALIYSASYRYSGVPSRFSGRGSGTDFTLTISSLQPEDFATYYCQQYYSTPWTFGQGTKVEIKRTTTPAPRPPTPAPTIASQPLSLRPEACRPAAGGAVHTRGLDFACDIYIWAPLAGTCGVLLLSLVITLYCKRGRKKLLYIFKQPFMRPVQTTQEEDGCSCRFPEEEEGGCELRVKFSRSADAPAYQQGQNQLYNELNLGRREEYDVLDKRRGRDPEMGGKPRRKNPQEGLYNELQKDKMAEAYSEIGMKGERRRGKGHDGLYQGLSTATKDTYDALHMQALPPR

SEQ ID NO: 180 - protein, 659 aa, Artificial sequence
  huK43-VH10/VL1 V5
EVQLVESGGGLVQPGRSLRLSCTASGFTFTDYYMSWVRQAPGKGLEWVGLIRSKADGYTTEYAASVKGRFTISRDDSQSIAYLQMNSLKTEDTAVYYCARDAAYYSYYSPEGAMDYWGQGTLVTVSSGGGGSGGGGSGGGGSDIVMTQSPSSVSASVGDRVTITCRASQNVDSAVAWYQQKPGKAPKALIYSASYRYSGVPSRFSGRGSGTDFTLTISSLQPEDFATYYCQQYYSTPWTFGQGTKVEIKREPKSPDKTHTCPPCPAPPVAGPSVFLFPPKPKDTLMIARTPEVTCVVVDVSHEDPEVKFNWYVDGVEVHNAKTKPREEQYNSTYRVVSVLTVLHQDWLNGKEYKCKVSNKALPAPIEKTISKAKGQPREPQVYTLPPSRDELTKNQVSLTCLVKGFYPSDIAVEWESNGQPENNYKTTPPVLDSDGSFFLYSKLTVDKSRWQQGNVFSCSVMHEALHNHYTQKSLSLSPGKIYIWAPLAGTCGVLLLSLVITLYCKRGRKKLLYIFKQPFMRPVQTTQEEDGCSCRFPEEEEGGCELRVKFSRSADAPAYQQGQNQLYNELNLGRREEYDVLDKRRGRDPEMGGKPRRKNPQEGLYNELQKDKMAEAYSEIGMKGERRRGKGHDGLYQGLSTATKDTYDALHMQALPPR

SEQ ID NO: 181 - protein, 659 aa, Artificial sequence
  huK43-VH9/VL6 V5
EVQLVESGGGLVQPGRSLRLSCTASGFTFTDYYMSWVRQAPGKGLEWVGLIRSKADGYTTEYSASVKGRFTISRDDSQSIAYLQMNSLKTEDTAVYYCARDAAYYSYYSPEGAMDYWGQGTLVTVSSGGGGSGGGGSGGGGSDIQMTQSPSSVSASVGDRVTITCKASQNVDSAVAWYQQKPGKAPKLLIYSASYRYSGVPSRFSGSGSGTDFTLTISSLQPEDFATYYCQQYYSTPWTFGQGTKVEIKREPKSPDKTHTCPPCPAPPVAGPSVFLFPPKPKDTLMIARTPEVTCVVVDVSHEDPEVKFNWYVDGVEVHNAKTKPREEQYNSTYRVVSVLTVLHQDWLNGKEYKCKVSNKALPAPIEKTISKAKGQPREPQVYTLPPSRDELTKNQVSLTCLVKGFYPSDIAVEWESNGQPENNYKTTPPVLDSDGSFFLYSKLTVDKSRWQQGNVFSCSVMHEALHNHYTQKSLSLSPGKIYIWAPLAGTCGVLLLSLVITLYCKRGRKKLLYIFKQPFMRPVQTTQEEDGCSCRFPEEEEGGCELRVKFSRSADAPAYQQGQNQLYNELNLGRREEYDVLDKRRGRDPEMGGKPRRKNPQEGLYNELQKDKMAEAYSEIGMKGERRRGKGHDGLYQGLSTATKDTYDALHMQALPPR

SEQ ID NO: 182 - protein, 659 aa, Artificial sequence
  huK43-VH10/VL3 V5
EVQLVESGGGLVQPGRSLRLSCTASGFTFTDYYMSWVRQAPGKGLEWVGLIRSKADGYTTEYAASVKGRFTISRDDSQSIAYLQMNSLKTEDTAVYYCARDAAYYSYYSPEGAMDYWGQGTLVTVSSGGGGSGGGGSGGGGSDIQMTQSPSSVSASVGDRVTITCRASQNVDSAVAWYQQKPGKAPKALIYSASYRYSGVPSRFSGSGSGTDFTLTISSLQPEDFATYYCQQYYSTPWTFGQGTKVEIKREPKSPDKTHTCPPCPAPPVAGPSVFLFPPKPKDTLMIARTPEVTCVVVDVSHEDPEVKFNWYVDGVEVHNAKTKPREEQYNSTYRVVSVLTVLHQDWLNGKEYKCKVSNKALPAPIEKTISKAKGQPREPQVYTLPPSRDELTKNQVSLTCLVKGFYPSDIAVEWESNGQPENNYKTTPPVLDSDGSFFLYSKLTVDKSRWQQGNVFSCSVMHEALHNHYTQKSLSLSPGKIYIWAPLAGTCGVLLLSLVITLYCKRGRKKLLYIFKQPFMRPVQTTQEEDGCSCRFPEEEEGGCELRVKFSRSADAPAYQQGQNQLYNELNLGRREEYDVLDKRRGRDPEMGGKPRRKNPQEGLYNELQKDKMAEAYSEIGMKGERRRGKGHDGLYQGLSTATKDTYDALHMQALPPR

SEQ ID NO: 183 - protein, 659 aa, Artificial sequence
  huK43-VH9/VL8 V5
EVQLVESGGGLVQPGRSLRLSCTASGFTFTDYYMSWVRQAPGKGLEWVGLIRSKADGYTTEYSASVKGRFTISRDDSQSIAYLQMNSLKTEDTAVYYCARDAAYYSYYSPEGAMDYWGQGTLVTVSSGGGGSGGGGSGGGGSDIQMTQSPSSVSASVGDRVTITCRASQNVDSAVAWYQQKPGKAPKALIYSASYRYSGVPSRFSGSGSGTDFTLTISSLQPEDLATYYCQQYYSTPWTFGQGTKVEIKREPKSPDKTHTCPPCPAPPVAGPSVFLFPPKPKDTLMIARTPEVTCVVVDVSHEDPEVKFNWYVDGVEVHNAKTKPREEQYNSTYRVVSVLTVLHQDWLNGKEYKCKVSNKALPAPIEKTISKAKGQPREPQVYTLPPSRDELTKNQVSLTCLVKGFYPSDIAVEWESNGQPENNYKTTPPVLDSDGSFFLYSKLTVDKSRWQQGNVFSCSVMHEALHNHYTQKSLSLSPGKIYIWAPLAGTCGVLLLSLVITLYCKRGRKKLLYIFKQPFMRPVQTTQEEDGCSCRFPEEEEGGCELRVKFSRSADAPAYQQGQNQLYNELNLGRREEYDVLDKRRGRDPEMGGKPRRKNPQEGLYNELQKDKMAEAYSEIGMKGERRRGKGHDGLYQGLSTATKDTYDALHMQALPPR

SEQ ID NO: 184 - protein, 659 aa, Artificial sequence
  huK43-VH2/VL3 V5
EVQLVESGGGLVQPGRSLRLSCTASGFTFTDYYMSWVRQAPGKGLEWVGLIRSKADGYTTEYSASVKGRFTISRDDSKSILYLQMNSLKTEDTAVYYCARDAAYYSYYSPEGAMDYWGQGTLVTVSSGGGGSGGGGSGGGGSDIQMTQSPSSVSASVGDRVTITCRASQNVDSAVAWYQQKPGKAPKALIYSASYRYSGVPSRFSGSGSGTDFTLTISSLQPEDFATYYCQQYYSTPWTFGQGTKVEIKREPKSPDKTHTCPPCPAPPVAGPSVFLFPPKPKDTLMIARTPEVTCVVVDVSHEDPEVKFNWYVDGVEVHNAKTKPREEQYNSTYRVVSVLTVLHQDWLNGKEYKCKVSNKALPAPIEKTISKAKGQPREPQVYTLPPSRDELTKNQVSLTCLVKGFYPSDIAVEWESNGQPENNYKTTPPVLDSDGSFFLYSKLTVDKSRWQQGNVFSCSVMHEALHNHYTQKSLSLSPGKIYIWAPLAGTCGVLLLSLVITLYCKRGRKKLLYIFKQPFMRPVQTTQEEDGCSCRFPEEEEGGCELRVKFSRSADAPAYQQGQNQLYNELNLGRREEYDVLDKRRGRDPEMGGKPRRKNPQEGLYNELQKDKMAEAYSEIGMKGERRRGKGHDGLYQGLSTATKDTYDALHMQALPPR

SEQ ID NO: 185 - protein, 659 aa, Artificial sequence
  huK43-VH10/VL9 V5
EVQLVESGGGLVQPGRSLRLSCTASGFTFTDYYMSWVRQAPGKGLEWVGLIRSKADGYTTEYAASVKGRFTISRDDSQSIAYLQMNSLKTEDTAVYYCARDAAYYSYYSPEGAMDYWGQGTLVTVSSGGGGSGGGGSGGGGSDIQMTQSPSSVSASVGDRVTITCKASQNVDSAVAWYQQKPGKAPKALIYSASYRYSGVPDRFSGSGSGTDFTLTISSLQPEDLATYYCQQYYSTPWTFGQGTKVEIKREPKSPDKTHTCPPCPAPPVAGPSVFLFPPKPKDTLMIARTPEVTCVVVDVSHEDPEVKFNWYVDGVEVHNAKTKPREEQYNSTYRVVSVLTVLHQDWLNGKEYKCKVSNKALPAPIEKTISKAKGQPREPQVYTLPPSRDELTKNQVSLTCLVKGFYPSDIAVEWESNGQPENNYKTTPPVLDSDGSFFLYSKLTVDKSRWQQGNVFSCSVMHEALHNHYTQKSLSLSPGKIYIWAPLAGTCGVLLLSLVITLYCKRGRKKLLYIFKQPFMRPVQTTQEEDGCSCRFPEEEEGGCELRVKFSRSADAPAYQQGQNQLYNELNLGRREEYDVLDKRRGRDPEMGGKPRRKNPQEGLYNELQKDKMAEAYSEIGMKGERRRGKGHDGLYQGLSTATKDTYDALHMQALPPR

SEQ ID NO: 186 - protein, 659 aa, Artificial sequence
  huK43-VH9/VL3 V5
EVQLVESGGGLVQPGRSLRLSCTASGFTFTDYYMSWVRQAPGKGLEWVGLIRSKADGYTTEYSASVKGRFTISRDDSQSIAYLQMNSLKTEDTAVYYCARDAAYYSYYSPEGAMDYWGQGTLVTVSSGGGGSGGGGSGGGGSDIQMTQSPSSVSASVGDRVTITCRASQNVDSAVAWYQQKPGKAPKALIYSASYRYSGVPSRFSGSGSGTDFTLTISSLQPEDFATYYCQQYYSTPWTFGQGTKVEIKREPKSPDKTHTCPPCPAPPVAGPSVFLFPPKPKDTLMIARTPEVTCVVVDVSHEDPEVKFNWYVDGVEVHNAKTKPREEQYNSTYRVVSVLTVLHQDWLNGKEYKCKVSNKALPAPIEKTISKAKGQPREPQVYTLPPSRDELTKNQVSLTCLVKGFYPSDIAVEWESNGQPENNYKTTPPVLDSDGSFFLYSKLTVDKSRWQQGNVFSCSVMHEALHNHYTQKSLSLSPGKIYIWAPLAGTCGVLLLSLVITLYCKRGRKKLLYIFKQPFMRPVQTTQEEDGCSCRFPEEEEGGCELRVKFSRSADAPAYQQGQNQLYNELNLGRREEYDVLDKRRGRDPEMGGKPRRKNPQEGLYNELQKDKMAEAYSEIGMKGERRRGKGHDGLYQGLSTATKDTYDALHMQALPPR

SEQ ID NO: 187 - protein, 659 aa, Artificial sequence
  huKlon43 VH2/VL1 V5
EVQLVESGGGLVQPGRSLRLSCTASGFTFTDYYMSWVRQAPGKGLEWVGLIRSKADGYTTEYSASVKGRFTISRDDSKSILYLQMNSLKTEDTAVYYCARDAAYYSYYSPEGAMDYWGQGTLVTVSSGGGGSGGGGSGGGGSDIVMTQSPSSVSASVGDRVTITCRASQNVDSAVAWYQQKPGKAPKALIYSASYRYSGVPSRFSGRGSGTDFTLTISSLQPEDFATYYCQQYYSTPWTFGQGTKVEIKREPKSPDKTHTCPPCPAPPVAGPSVFLFPPKPKDTLMIARTPEVTCVVVDVSHEDPEVKFNWYVDGVEVHNAKTKPREEQYNSTYRVVSVLTVLHQDWLNGKEYKCKVSNKALPAPIEKTISKAKGQPREPQVYTLPPSRDELTKNQVSLTCLVKGFYPSDIAVEWESNGQPENNYKTTPPVLDSDGSFFLYSKLTVDKSRWQQGNVFSCSVMHEALHNHYTQKSLSLSPGKIYIWAPLAGTCGVLLLSLVITLYCKRGRKKLLYIFKQPFMRPVQTTQEEDGCSCRFPEEEEGGCELRVKFSRSADAPAYQQGQNQLYNELNLGRREEYDVLDKRRGRDPEMGGKPRRKNPQEGLYNELQKDKMAEAYSEIGMKGERRRGKGHDGLYQGLSTATKDTYDALHMQALPPR

SEQ ID NO: 188 - protein, 511 aa, artificial sequence
  anti-CD123 CAR No 1
MALPVTALLLPLALLLHAARPQIQLVQSGPELKKPGETVKISCKASGYIFTNYGMNWVKQAPGKSFKWMGWINTYTGESTYSADFKGRFAFSLETSASTAYLHINDLKNEDTATYFCARSGGYDPMDYWGQGTSVTVSSGGGGSGGGGSGGGGSDIVLTQSPASLAVSLGQRATISCRASESVDNYGNTFMHWYQQKPGQPPKLLIYRASNLESGIPARFSGSGSRTDFTLTINPVEADDVATYYCQQSNEDPPTFGAGTKLELKRSDPGSGGGGSCPYSNPSLCAPTTTPAPRPPTPAPTIASQPLSLRPEACRPAAGGAVHTRGLDFACDIYIWAPLAGTCGVLLLSLVITLYCRRGRKKLLYIFKQPFMRPVQTTQEEDGCSCRFPEEEEGGCELRVKFSRSADAPAYQQGQNQLYNELNLGRREEYDVLDKRRGRDPEMGGKPRRKNPQEGLYNELQKDKMAEAYSEIGMKGERRRGKGHDGLYQGLSTATKDTYDALHMQALPPRE

SEQ ID NO: 189 - protein, 517 aa, artificial sequence
  anti-CD123 CAR No 2
MALPVTALLLPLALLLHAARPQIQLVQSGPELKKPGETVKISCKASGYIFTNYGMNWVKQAPGKSFKWMGWINTYTGESTYSADFKGRFAFSLETSASTAYLHINDLKNEDTATYFCARSGGYDPMDYWGQGTSVTVSSGGGGSGGGGSGGGGSDIVLTQSPASLAVSLGQRATISCRASESVDNYGNTFMHWYQQKPGQPPKLLIYRASNLESGIPARFSGSGSRTDFTLTINPVEADDVATYYCQQSNEDPPTFGAGTKLELKRSDPGSGGGGSCPYSNPSLCSGGGGSAPTTTPAPRPPTPAPTIASQPLSLRPEACRPAAGGAVHTRGLDFACDIYIWAPLAGTCGVLLLSLVITLYCRRGRKKLLYIFKQPFMRPVQTTQEEDGCSCRFPEEEEGGCELRVKFSRSADAPAYQQGQNQLYNELNLGRREEYDVLDKRRGRDPEMGGKPRRKNPQEGLYNELQKDKMAEAYSEIGMKGERRRGKGHDGLYQGLSTATKDTYDALHMQALPPRE

SEQ ID NO: 190 - protein, 526 aa, artificial sequence
  anti-CD123 CAR No 3
MALPVTALLLPLALLLHAARPQIQLVQSGPELKKPGETVKISCKASGYIFTNYGMNWVKQAPGKSFKWMGWINTYTGESTYSADFKGRFAFSLETSASTAYLHINDLKNEDTATYFCARSGGYDPMDYWGQGTSVTVSSGGGGSGGGGSGGGGSDIVLTQSPASLAVSLGQRATISCRASESVDNYGNTFMHWYQQKPGQPPKLLIYRASNLESGIPARFSGSGSRTDFTLTINPVEADDVATYYCQQSNEDPPTFGAGTKLELKRSDPGSGGGGSCPYSNPSLCSGGGGSCPYSNPSLCAPTTTPAPRPPTPAPTIASQPLSLRPEACRPAAGGAVHTRGLDFACDIYIWAPLAGTCGVLLLSLVITLYCRRGRKKLLYIFKQPFMRPVQTTQEEDGCSCRFPEEEEGGCELRVKFSRSADAPAYQQGQNQLYNELNLGRREEYDVLDKRRGRDPEMGGKPRRKNPQEGLYNELQKDKMAEAYSEIGMKGERRRGKGHDGLYQGLSTATKDTYDALHMQALPPRE

SEQ ID NO: 191 - protein, 532 aa, artificial sequence
  anti-CD123 CAR No 4
MALPVTALLLPLALLLHAARPQIQLVQSGPELKKPGETVKISCKASGYIFTNYGMNWVKQAPGKSFKWMGWINTYTGESTYSADFKGRFAFSLETSASTAYLHINDLKNEDTATYFCARSGGYDPMDYWGQGTSVTVSSGGGGSGGGGSGGGGSDIVLTQSPASLAVSLGQRATISCRASESVDNYGNTFMHWYQQKPGQPPKLLIYRASNLESGIPARFSGSGSRTDFTLTINPVEADDVATYYCQQSNEDPPTFGAGTKLELKRSDPGSGGGGSCPYSNPSLCSGGGGSCPYSNPSLCSGGGGSAPTTTPAPRPPTPAPTIASQPLSLRPEACRPAAGGAVHTRGLDFACDIYIWAPLAGTCGVLLLSLVITLYCRRGRKKLLYIFKQPFMRPVQTTQEEDGCSCRFPEEEEGGCELRVKFSRSADAPAYQQGQNQLYNELNLGRREEYDVLDKRRGRDPEMGGKPRRKNPQEGLYNELQKDKMAEAYSEIGMKGERRRGKGHDGLYQGLSTATKDTYDALHMQALPPRE

SEQ ID NO: 192 - protein, 495 aa, artificial sequence
  anti-CD123 CAR No 5
MALPVTALLLPLALLLHAARPQIQLVQSGPELKKPGETVKISCKASGYIFTNYGMNWVKQAPGKSFKWMGWINTYTGESTYSADFKGRFAFSLETSASTAYLHINDLKNEDTATYFCARSGGYDPMDYWGQGTSVTVSSGGGCPYSNPSLCGGGGSDIVLTQSPASLAVSLGQRATISCRASESVDNYGNTFMHWYQQKPGQPPKLLIYRASNLESGIPARFSGSGSRTDFTLTINPVEADDVATYYCQQSNEDPPTFGAGTKLELKRSDPTTTPAPRPPTPAPTIASQPLSLRPEACRPAAGGAVHTRGLDFACDIYIWAPLAGTCGVLLLSLVITLYCRRGRKKLLYIFKQPFMRPVQTTQEEDGCSCRFPEEEEGGCELRVKFSRSADAPAYQQGQNQLYNELNLGRREEYDVLDKRRGRDPEMGGKPRRKNPQEGLYNELQKDKMAEAYSEIGMKGERRRGKGHDGLYQGLSTATKDTYDALHMQALPPRE

SEQ ID NO: 193 - protein, 501 aa, artificial sequence
  anti-CD123 CAR No 6
MALPVTALLLPLALLLHAARPQIQLVQSGPELKKPGETVKISCKASGYIFTNYGMNWVKQAPGKSFKWMGWINTYTGESTYSADFKGRFAFSLETSASTAYLHINDLKNEDTATYFCARSGGYDPMDYWGQGTSVTVSSGGGGGGCPYSNPSLCGGGGGGGSDIVLTQSPASLAVSLGQRATISCRASESVDNYGNTFMHWYQQKPGQPPKLLIYRASNLESGIPARFSGSGSRTDFTLTINPVEADDVATYYCQQSNEDPPTFGAGTKLELKRSDPTTTPAPRPPTPAPTIASQPLSLRPEACRPAAGGAVHTRGLDFACDIYIWAPLAGTCGVLLLSLVITLYCRRGRKKLLYIFKQPFMRPVQTTQEEDGCSCRFPEEEEGGCELRVKFSRSADAPAYQQGQNQLYNELNLGRREEYDVLDKRRGRDPEMGGKPRRKNPQEGLYNELQKDKMAEAYSEIGMKGERRRGKGHDGLYQGLSTATKDTYDALHMQALPPRE

SEQ ID NO: 194 - protein, 508 aa, artificial sequence
  anti-CD123 CAR No 7
MALPVTALLLPLALLLHAARPGGGGSCPYSNPSLCGQIQLVQSGPELKKPGETVKISCKASGYIFTNYGMNWVKQAPGKSFKWMGWINTYTGESTYSADFKGRFAFSLETSASTAYLHINDLKNEDTATYFCARSGGYDPMDYWGQGTSVTVSSGGGGSGGGGSGGGGSDIVLTQSPASLAVSLGQRATISCRASESVDNYGNTFMHWYQQKPGQPPKLLIYRASNLESGIPARFSGSGSRTDFTLTINPVEADDVATYYCQQSNEDPPTFGAGTKLELKRSDPTTTPAPRPPTPAPTIASQPLSLRPEACRPAAGGAVHTRGLDFACDIYIWAPLAGTCGVLLLSLVITLYCRRGRKKLLYIFKQPFMRPVQTTQEEDGCSCRFPEEEEGGCELRVKFSRSADAPAYQQGQNQLYNELNLGRREEYDVLDKRRGRDPEMGGKPRRKNPQEGLYNELQKDKMAEAYSEIGMKGERRRGKGHDGLYQGLSTATKDTYDALHMQALPPRE

SEQ ID NO: 195 - protein, 514 aa, artificial sequence
  anti-CD123 CAR No 8
MALPVTALLLPLALLLHAARPGGGGSCPYSNPSLCSGGGGSGQIQLVQSGPELKKPGETVKISCKASGYIFTNYGMNWVKQAPGKSFKWMGWINTYTGESTYSADFKGRFAFSLETSASTAYLHINDLKNEDTATYFCARSGGYDPMDYWGQGTSVTVSSGGGGSGGGGSGGGGSDIVLTQSPASLAVSLGQRATISCRASESVDNYGNTFMHWYQQKPGQPPKLLIYRASNLESGIPARFSGSGSRTDFTLTINPVEADDVATYYCQQSNEDPPTFGAGTKLELKRSDPTTTPAPRPPTPAPTIASQPLSLRPEACRPAAGGAVHTRGLDFACDIYIWAPLAGTCGVLLLSLVITLYCRRGRKKLLYIFKQPFMRPVQTTQEEDGCSCRFPEEEEGGCELRVKFSRSADAPAYQQGQNQLYNELNLGRREEYDVLDKRRGRDPEMGGKPRRKNPQEGLYNELQKDKMAEAYSEIGMKGERRRGKGHDGLYQGLSTATKDTYDALHMQALPPRE

SEQ ID NO: 196 - protein, 523 aa, artificial sequence
  anti-CD123 CAR No 9
MALPVTALLLPLALLLHAARPGGGGSCPYSNPSLCSGGGGSCPYSNPSLCGQIQLVQSGPELKKPGETVKISCKASGYIFTNYGMNWVKQAPGKSFKWMGWINTYTGESTYSADFKGRFAFSLETSASTAYLHINDLKNEDTATYFCARSGGYDPMDYWGQGTSVTVSSGGGGSGGGGSGGGGSDIVLTQSPASLAVSLGQRATISCRASESVDNYGNTFMHWYQQKPGQPPKLLIYRASNLESGIPARFSGSGSRTDFTLTINPVEADDVATYYCQQSNEDPPTFGAGTKLELKRSDPTTTPAPRPPTPAPTIASQPLSLRPEACRPAAGGAVHTRGLDFACDIYIWAPLAGTCGVLLLSLVITLYCRRGRKKLLYIFKQPFMRPVQTTQEEDGCSCRFPEEEEGGCELRVKFSRSADAPAYQQGQNQLYNELNLGRREEYDVLDKRRGRDPEMGGKPRRKNPQEGLYNELQKDKMAEAYSEIGMKGERRRGKGHDGLYQGLSTATKDTYDALHMQALPPRE

SEQ ID NO: 197 - protein, 529 aa, artificial sequence
  anti-CD123 CAR No 10
MALPVTALLLPLALLLHAARPGGGGSCPYSNPSLCSGGGGSCPYSNPSLCSGGGGSGQIQLVQSGPELKKPGETVKISCKASGYIFTNYGMNWVKQAPGKSFKWMGWINTYTGESTYSADFKGRFAFSLETSASTAYLHINDLKNEDTATYFCARSGGYDPMDYWGQGTSVTVSSGGGGSGGGGSGGGGSDIVLTQSPASLAVSLGQRATISCRASESVDNYGNTFMHWYQQKPGQPPKLLIYRASNLESGIPARFSGSGSRTDFTLTINPVEADDVATYYCQQSNEDPPTFGAGTKLELKRSDPTTTPAPRPPTPAPTIASQPLSLRPEACRPAAGGAVHTRGLDFACDIYIWAPLAGTCGVLLLSLVITLYCRRGRKKLLYIFKQPFMRPVQTTQEEDGCSCRFPEEEEGGCELRVKFSRSADAPAYQQGQNQLYNELNLGRREEYDVLDKRRGRDPEMGGKPRRKNPQEGLYNELQKDKMAEAYSEIGMKGERRRGKGHDGLYQGLSTATKDTYDALHMQALPPRE

SEQ ID NO: 198 - protein, 4 aa, artificial sequence
  linker
GGGS

SEQ ID NO: 199 - protein, 6 aa, artificial sequence
  linker
SGGGGS

SEQ ID NO: 200 - protein, 7 aa, artificial sequence
  linker
GSGGGGS

SEQ ID NO: 201 - protein, 4 aa, artificial sequence
  linker
SGGS

SEQ ID NO: 202 - protein, 5 aa, artificial sequence
  linker
SSGGS

SEQ ID NO: 203 - protein, 4 aa, artificial sequence
  linker
GGGG

SEQ ID NO: 204 - protein, 5 aa, artificial sequence
  linker
SGGGG

SEQ ID NO: 205 - protein, 5 aa, artificial sequence
  linker
GGGGS

SEQ ID NO: 206 - protein, 6 aa, artificial sequence
  linker
GGGGGS

SEQ ID NO: 207 - protein, 7 aa, artificial sequence
  linker
SGGGGGS

SEQ ID NO: 208 - protein, 6 aa, artificial sequence
  linker
SGGGGG

SEQ ID NO: 209 - protein, 8 aa, artificial sequence
  linker
GGGGGGGS

SEQ ID NO: 210 - protein, 8 aa, artificial sequence
  linker
SGGGGGGG

SEQ ID NO: 211 - protein, 9 aa, artificial sequence
  linker
SGGGGGGGS

SEQ ID NO: 212 - protein, 11 aa, artificial sequence
  linker
SGGGGSGGGGS
